(19) United States
(12) Patent Application Publication
(10) Pub. No.: US 2025/0205292 A1
(43) Pub. Date: Jun. 26, 2025

(54) PHARMACEUTICAL COMPOSITIONS AND USES THEREOF

(71) Applicant: Siolta Therapeutics, Inc., San Carlos, CA (US)

(72) Inventors: Nikole KIMES, San Francisco, CA (US); Ricardo VALLADARES, Brookhaven, GA (US)

(21) Appl. No.: 18/967,879

(22) Filed: Dec. 4, 2024

Related U.S. Application Data
(63) Continuation of application No. PCT/US23/68094, filed on Jun. 7, 2023.
(60) Provisional application No. 63/350,666, filed on Jun. 9, 2022.

(51) Int. Cl. A61K 35/747; A61K 35/745; A61P 1/00; A61P 15/02; A61P 31/04

(52) U.S. Cl. CPC A61K 35/747; A61K 35/745; A61P 1/00; A61P 15/02; A61P 31/04

(57) ABSTRACT

Provided herein are pharmaceutical compositions comprising a bacterial population. The bacterial population comprises one bacterial strains or at least two bacterial strains. Such pharmaceutical compositions can be administered to a subject for prevention and/or treatment of dysbiosis and dysbiosis associated conditions and diseases, such as vaginal or infant gastrointestinal diseases.

### CROSS-REFERENCE

[0001] This application is a continuation of International Patent Application No. PCT/US23/68094, filed Jun. 7, 2023, which claims priority to and the benefit of U.S. Provisional Application No. 63/350,666, filed Jun. 9, 2022, the entire contents of each of which application is incorporated herein by reference in its entirety.

### SEQUENCE LISTING

[0002] The instant application contains a Sequence Listing which has been submitted electronically in XML format and is hereby incorporated by reference in its entirety. Said XML copy, created on Jun. 6, 2023, is named 53206-715_301_SL.xml and is 42.796 megabytes in size.

### BACKGROUND

[0003] Recent developments in the areas of microbiome and genome research provide evidence that the microbiome-host relationships influence human health or disease onset and progression. For example, they have been implicated in the inflammatory diseases Bacterial Vaginosis (BV) and Necrotizing Enterocolitis (NEC), playing key roles in the etiology of these disorders. The rising incidence of these diseases is concerning and represents a major public health challenge.

[0004] Currently available pharmaceutical compositions, however, can lack effectiveness, scalability, reliability, or stability.

### BRIEF SUMMARY

[0005] Restoring the microbiome-host homeostasis can help treating these disorders. Effective treatments can comprise administration of live biotherapeutics.

[0006] Disclosed herein, in some embodiments, are methods of treating a disease or disease condition in a subject in need thereof. In an aspect, a method of treating a disease or disease condition in a subject in need thereof comprises: administering to the subject a therapeutically-effective amount of a formulation, wherein the formulation comprises a bacterial population comprising a first bacterial strain and a second bacterial strain different from the first bacterial strain, wherein the first bacterial strain and the second bacterial strain comprise Bifidobacterium sp. or Vertebrate-Associated Lactobacillaceae, and wherein the formulation inhibits: (1) a growth or biofilm formation of a pathogen by at least 0.1% or (2) an immune response signaling pathway by at least 0.1%, relative to a growth or biofilm formation of the pathogen or the immune response signaling pathway when inhibited by a control formulation not comprising the first bacterial strain and the second bacterial strain, respectively.

[0007] In some embodiments, the disease or disease condition comprises a vaginal disease or a complication associated with the vaginal disease. In some embodiments, the vaginal disease comprises bacterial vaginosis (BV) or recurrent BV, and wherein the complication associated with the vaginal disease comprises preterm birth, pelvic inflammatory disease (PID), vulvovaginitis or sexually transmitted infections (STIs). In some embodiments, the formulation inhibits a growth or biofilm formation of a vaginal pathogen. In some embodiments, the formulation inhibits the growth or biofilm formation of the vaginal pathogen by at least 0.1% relative to a growth or biofilm formation of the vaginal pathogen when inhibited by the control formulation. In some embodiments, the formulation inhibits the growth or biofilm formation of the vaginal pathogen by at least 5% or by at least 50% relative to the growth or biofilm formation of the vaginal pathogen when inhibited by the control formulation. In some embodiments, the subject has been administered with a medication for treating the vaginal disease. In some embodiments, the medication comprises an antibiotic. In some embodiments, the subject has not been administered with a medication for treating the vaginal disease. In some embodiments, the disease or disease condition comprises an infant gastrointestinal disease. In some embodiments, the infant gastrointestinal disease comprises necrotizing enterocolitis (NEC), infectious gastroenteritis, neonatal cholestasis, pediatric intestinal motility disorders, gastroenteritis, Inflammatory bowel disease (IBD), Irritable bowel syndrome (IBS), or a combination thereof. In some embodiments, the formulation inhibits a growth of an infant gastrointestinal pathogen. In some embodiments, the formulation inhibits the growth of the infant gastrointestinal pathogen by at least 0.1% relative to a growth of the infant gastrointestinal pathogen when inhibited by the control formulation. In some embodiments, the formulation inhibits the growth of the infant gastrointestinal pathogen by at least 5% or by at least 50% relative to the growth of the infant gastrointestinal pathogen when inhibited by the control formulation. In some embodiments, the formulation inhibits a signal of an immune response reporter of the immune response signaling pathway within an engineered cell by at least 0.1% relative to a signal of the immune response reporter of the immune response signaling pathway within the engineered cell when inhibited by the control formulation. In some embodiments, the formulation inhibits the signal of the immune response reporter of the immune response signaling pathway within the engineered cell by at least 1% or by at least 10% relative to the signal of the immune response reporter of the immune response signaling pathway within the engineered cell when inhibited by the control formulation. In some embodiments, the engineered cell comprises a mammalian cell. In some embodiments, the immune response reporter comprises an inflammatory immune response reporter.

[0008] Disclosed herein, in some embodiments, are compositions. In an aspect, a composition comprises: a bacterial population comprising a first bacterial strain and a second bacterial strain different from the first bacterial strain for use in treating a disease or disease condition in a subject in need thereof, wherein the first bacterial strain and the second bacterial strain comprise Bifidobacterium sp. or Vertebrate-Associated Lactobacillaceae, and wherein the composition is configured to treat the disease or disease condition at least in part by: (1) inhibiting a growth or biofilm formation of a pathogen in the subject by at least 0.1%, relative to a growth or biofilm formation of the pathogen in the subject when inhibited by a control composition comprising a control bacterial population that does not comprise the first bacterial strain and the second bacterial strain; or (2) inhibiting an immune response signaling pathway of a cell of the subject by at least 0.1%, relative to the immune response signaling pathway of the cell of the subject when inhibited by the control composition.

[0009] In some embodiments, the disease or disease condition comprises an infant gastrointestinal disease. In some embodiments, the pathogen comprises an infant gastrointestinal pathogen. In some embodiments, the composition is configured to treat the infant gastrointestinal disease at least in part by inhibiting a growth of the infant gastrointestinal pathogen in the subject by at least 0.1% relative to a growth of the infant gastrointestinal pathogen in the subject when inhibited by the control composition. In some embodiments, the composition is configured to treat the infant gastrointestinal disease at least in part by inhibiting the growth of the infant gastrointestinal pathogen in the subject by at least 5% or by at least 50% relative to the growth of the infant gastrointestinal pathogen in the subject when inhibited by the control composition. In some embodiments, the composition is configured to inhibit the immune response signaling pathway of the cell of the subject by at least 1% or by at least 10% relative to the immune response signaling pathway of the cell of the subject when inhibited by the control formulation. In some embodiments, the disease or disease condition comprises a vaginal disease or a complication associated with the vaginal disease. In some embodiments, the vaginal disease comprises bacterial vaginosis (BV) or recurrent BV, and wherein the complication associated with the vaginal disease comprises preterm birth, pelvic inflammatory disease (PID), vulvovaginitis, or sexually transmitted infections (STIs). In some embodiments, the pathogen comprises a vaginal pathogen. In some embodiments, the composition is configured to treat the vaginal disease or the complication associated with the vaginal disease at least in part by inhibiting a growth or biofilm formation of the vaginal pathogen in the subject by at least 0.10% relative to a growth or biofilm formation of the vaginal pathogen in the subject when inhibited by the control composition. In some embodiments, the composition is configured to treat the vaginal disease or the complication associated with the vaginal disease at least in part by inhibiting the growth or biofilm formation of the vaginal pathogen in the subject by at least 5% or by at least 50% relative to the growth or biofilm formation of the vaginal pathogen in the subject when inhibited by the control composition.

[0010] Disclosed herein, in some embodiments, are compositions. In an aspect, a composition comprises: a bacterial population comprising a first bacterial strain and a second bacterial strain different from the first bacterial strain, wherein the first bacterial strain and the second bacterial strain comprise Bifidobacterium sp. or Vertebrate-Associated Lactobacillaceae, and wherein when the first bacterial strain is cultured with (1) the second bacterial strain or (2) a cultured medium of the second bacterial strain: (a) the first bacterial strain inhibits a growth or biofilm formation of a pathogen by at least 0.1% relative to a growth or biofilm formation of the pathogen when inhibited by a control bacterial strain comprising the first bacterial strain not cultured with (1) the second bacterial strain or (2) the cultured medium of the second bacterial strain, respectively, (b) the first bacterial strain inhibits an immune response signaling pathway by at least 0.1% relative to the immune response signaling pathway when inhibited by the control bacterial strain, respectively, (c) a cultured medium of the first bacterial strain inhibits the growth or biofilm formation of the pathogen by at least 0.1% relative to a growth or biofilm formation of the pathogen when inhibited by a cultured medium of the control bacterial strain, respectively, or (d) the cultured medium of the first bacterial strain inhibits the immune response signaling pathway by at least 0.1% relative to the immune response signaling pathway when inhibited by the cultured medium of the control bacterial strain, respectively.

[0011] In some embodiments, the pathogen comprises an infant gastrointestinal pathogen. In some embodiments, when the first bacterial strain is cultured with (1) the second bacterial strain or (2) the cultured medium of the second bacterial strain: (a) the first bacterial strain inhibits a growth of the infant gastrointestinal pathogen by at least 0.1% relative to a growth of the infant gastrointestinal pathogen when inhibited by the control bacterial strain, respectively, or (b) the cultured medium of the first bacterial strain inhibits the growth of the infant gastrointestinal pathogen by at least 0.1% relative to a growth of the infant gastrointestinal pathogen when inhibited by the cultured medium of the control bacterial strain, respectively. In some embodiments, when the first bacterial strain is cultured with (1) the second bacterial strain or (2) the cultured medium of the second bacterial strain: (a) the first bacterial strain inhibits the growth of the infant gastrointestinal pathogen by at least 5% or by at least 50% relative to the growth of the infant gastrointestinal pathogen when inhibited by the control bacterial strain, respectively, or (b) the cultured medium of the first bacterial strain inhibits the growth of the infant gastrointestinal pathogen by at least 5% or by at least 50% relative to the growth of the infant gastrointestinal pathogen when inhibited by the cultured medium of the control bacterial strain, respectively. In some embodiments, when the first bacterial strain is cultured with (1) the second bacterial strain or (2) the cultured medium of the second bacterial strain: (a) the first bacterial strain inhibits a signal of an immune response reporter of the immune response signaling pathway within an engineered cell by at least 0.1%, relative to a signal of the immune response reporter of the immune response signaling pathway within the engineered cell when inhibited by the control bacterial strain, respectively, or (b) the cultured medium of the first bacterial strain inhibits the signal of the immune response reporter of the immune response signaling pathway within the engineered cell by at least 0.1%, relative to a signal of the immune response reporter of the immune response signaling pathway within the engineered cell when inhibited by the cultured medium of the control bacterial strain, respectively. In some embodiments, when the first bacterial strain is cultured with (1) the second bacterial strain or (2) the cultured medium of the second bacterial strain: (a) the first bacterial strain inhibits the signal of the immune response reporter of the immune response signaling pathway within the engineered cell by at least 1% or by at least 10% relative to the signal of the immune response reporter of the immune response signaling pathway within the engineered cell when inhibited by the control bacterial strain, respectively, (b) the cultured medium of the first bacterial strain inhibits the signal of the immune response reporter of the immune response signaling pathway within the engineered cell by at least 1% or by at least 10% relative to the signal of the immune response reporter of the immune response signaling pathway within the engineered cell when inhibited by the cultured medium of the control bacterial strain, respectively. In some embodiments, the engineered cell comprises a mammalian cell. In some embodiments, the immune response reporter comprises an inflammatory immune response reporter. In some embodiments, the pathogen comprises a vaginal pathogen. In some embodiments, when the first bacterial strain is cultured with (1) the second bacterial strain or (2) the cultured medium of the second bacterial strain: (a) the first bacterial strain inhibits a growth or biofilm formation of the vaginal pathogen by at least 0.1% relative to a growth or biofilm formation of the vaginal pathogen when inhibited by the control bacterial strain, respectively, (b) the cultured medium of the first bacterial strain inhibits the growth or biofilm formation of the vaginal pathogen by at least 0.1% relative to a growth or biofilm formation of the vaginal pathogen when inhibited by the cultured medium of the control bacterial strain, respectively. In some embodiments, when the first bacterial strain is cultured with (1) the second bacterial strain or (2) the cultured medium of the second bacterial strain: (a) the first bacterial strain inhibits the growth or biofilm formation of the vaginal pathogen by at least 5% or by at least 50% relative to the growth or biofilm formation of the vaginal pathogen when inhibited by the control bacterial strain, respectively, (b) the cultured medium of the first bacterial strain inhibits the growth of the vaginal pathogen by at least 5% or by at least 50% relative to the growth or biofilm formation of the vaginal pathogen when inhibited by the cultured medium of the control bacterial strain, respectively.

[0012] Disclosed herein, in some embodiments, are compositions. In an aspect, a composition comprises: a cultured medium or derivative thereof of a bacterial population comprising (1) a first bacterial strain and (2) a second bacterial strain or a supernatant thereof, wherein the second bacterial strain is different from the first bacterial strain, wherein the first bacterial strain and the second bacterial strain comprise Bifidobacterium sp. or Vertebrate-Associated Lactobacillaceae, wherein the cultured medium or derivative thereof is configured to inhibit: (1) a growth or biofilm formation of a pathogen by at least 0.1% relative to a growth or biofilm formation of the pathogen when inhibited by a control cultured medium or derivative thereof of a control bacterial population or (2) an immune response signaling pathway by at least 0.1%, relative to the immune signaling pathway when inhibited by the control cultured medium or derivative thereof of the control bacterial population, and wherein the control bacterial population does not comprise (1) the first bacterial strain and (2) the second bacterial strain or the supernatant thereof.

[0013] In some embodiments, the pathogen comprises an infant gastrointestinal pathogen. In some embodiments, the cultured medium or derivative thereof is configured to inhibit a growth of the infant gastrointestinal pathogen by at least 0.1% relative to a growth of the infant gastrointestinal pathogen when inhibited by the control cultured medium or derivative thereof of the control bacterial population. In some embodiments, the cultured medium or derivative thereof is configured to inhibit the growth of the infant gastrointestinal pathogen by at least 5% or by at least 50% relative to the growth of the infant gastrointestinal pathogen when inhibited by the control cultured medium or derivative thereof of the control bacterial population. In some embodiments, the cultured medium or derivative thereof is configured to inhibit a signal of an immune response reporter of the immune response signaling pathway within an engineered cell by at least 0.1% relative to a signal of the immune response reporter of the immune response signaling pathway within the engineered cell when inhibited by the control cultured medium or derivative thereof of the control bacterial population. In some embodiments, the cultured medium or derivative thereof is configured to inhibit the signal of the immune response reporter of the immune response signaling pathway within the engineered cell by at least 1% or by at least 10%, relative to the signal of the immune response reporter of the immune response signaling pathway within the engineered cell when inhibited by the control cultured medium or derivative thereof of the control bacterial population. In some embodiments, the engineered cell comprises a mammalian cell. In some embodiments, the immune response reporter comprises an inflammatory immune response reporter. In some embodiments, the pathogen comprises a vaginal pathogen. In some embodiments, the cultured medium or derivative thereof is configured to inhibit a growth or biofilm formation of the vaginal pathogen by at least 0.1% relative to a growth or biofilm formation of the vaginal pathogen when inhibited by the control cultured medium or derivative thereof of the control bacterial population. In some embodiments, the cultured medium or derivative thereof is configured to inhibit the growth or biofilm formation of the vaginal pathogen by at least 5% or by at least 50% relative to the growth or biofilm formation of the vaginal pathogen when inhibited by the control cultured medium or derivative thereof of the control bacterial population.

[0014] Disclosed herein, in some embodiments, are methods of treating a disease or disease condition in a subject in need thereof. In an aspect, a method of treating a disease or disease condition in a subject in need thereof comprises: administering to the subject a therapeutically-effective amount of a formulation comprising a supernatant of a culture or a derivative of the supernatant, wherein the culture comprises (1) a first bacterial strain and (2) a second bacterial strain or a cultured medium thereof, wherein the second bacterial strain is different from the first bacterial strain, wherein the first bacterial strain and the second bacterial strain comprise Bifidobacterium sp. or Vertebrate-Associated Lactobacillaceae, wherein the formulation inhibits (i) a growth or biofilm formation of a pathogen by at least 0.1% or (ii) an immune response signaling pathway by at least 0.1%, relative to a growth or biofilm formation of the pathogen or the immune response signaling pathway when inhibited by a control formulation comprising a control supernatant of a control culture or a derivative of the control supernatant, respectively, and wherein the control culture does not comprise (1) the first bacterial strain and (2) the second bacterial strain or the cultured medium thereof.

[0015] In some embodiments, the pathogen comprises an infant gastrointestinal pathogen. In some embodiments, the formulation inhibits a growth of the infant gastrointestinal pathogen by at least 0.1% relative to a growth of the infant gastrointestinal pathogen when inhibited by the control formulation. In some embodiments, the formulation inhibits the growth of the infant gastrointestinal pathogen by at least 5% or by at least 50% relative to the growth of the infant gastrointestinal pathogen when inhibited by the control formulation. In some embodiments, the formulation inhibits a signal of an immune response reporter of the immune response signaling pathway within an engineered cell by at least 0.1% relative to a signal of the immune response reporter of the immune response signaling pathway within the engineered cell when inhibited by the control formulation. In some embodiments, the formulation inhibits signal of the immune response reporter of the immune response signaling pathway within the engineered cell by at least 1% or at least 10% relative to the signal of the immune response reporter of the immune response signaling pathway within the engineered cell when inhibited by the control formulation. In some embodiments, the immune response signaling pathway comprises an inflammatory immune response signaling pathway. In some embodiments, the pathogen comprises a vaginal pathogen. In some embodiments, the formulation inhibits a growth or biofilm formation of the vaginal pathogen by at least 0.1% relative to a growth or biofilm formation of the vaginal pathogen when inhibited by the control formulation. In some embodiments, the formulation inhibits the growth or biofilm formation of the vaginal pathogen by at least 5% or by at least 50% relative to the growth or biofilm formation of the vaginal pathogen when inhibited by the control formulation.

[0016] In the compositions disclosed herein: In some embodiments, the composition is formulated in a vaginal dosage form. In some embodiments, the composition further comprises a pharmaceutically acceptable excipient. In some embodiments, the pharmaceutically acceptable excipient comprises a hydrogel. In some embodiments, the first bacterial strain or the second bacterial strain is configured to exhibit an adherence to a vaginal epithelial cell (VEC) by at least 1×10\hat{ }2 [colony-forming units (CFU)/9.5 centimeter square (cm\hat{ }2)] or by at least 1×10\hat{ }6 log CFU/cm\hat{ }2. In some embodiments, the first bacterial strain or the second bacterial strain is configured to exhibit a growth ratio of at least about 0.1 or at least about 0.5 between (1) the first bacterial strain or the second bacterial strain being cultured in a culture medium comprising a carbon source consisting of glycogen and (2) the first bacterial strain or the second bacterial strain being cultured in a culture medium comprising a carbon source consisting of glucose, respectively. In some embodiments, the vaginal pathogen comprises Prevotella bivia, Atopobium vaginae, Sneathia spp., G. vaginalis, L. iners, or a combination thereof. In some embodiments, the first bacterial strain or the second bacterial strain is configured to inhibit a growth of the vaginal pathogen by at least 5% or at least 20%, relative to a growth of the vaginal pathogen not inhibited by the first bacterial strain or the second bacterial strain, respectively. In some embodiments, the composition comprises a bacterial product generated by the first bacterial strain or the second bacterial strain. In some embodiments, the bacterial product is a fermentation product of the first bacterial strain or the second bacterial strain. In some embodiments, the bacterial product is a secreted metabolite of the first bacterial strain or the second bacterial strain. In some embodiments, the first bacterial strain or the second bacterial strain comprises the Vertebrate-Associated Lactobacillaceae. In some embodiments, the first bacterial strain comprises L. jensenii or L. gasseri. In some embodiments, the first bacterial strain comprise L. jensenii ST21 (DSM34525) or L. gasseri ST105 (DSM34528). In some embodiments, the first bacterial strain comprises at least two bacterial strains In some embodiments, the at least two bacterial strains comprise L. jensenii and L. gasseri. In some embodiments, the at least two bacterial strains comprise L. jensenii ST21 (DSM 34525) and L. gasseri ST105 (DSM34528). In some embodiments, the second bacterial strain comprises L. crispatus. In some embodiments, the second bacterial strain comprises L. crispatus ST100 (DSM33187), L. crispatus ST20 (DSM34527), or L. crispatus ST112 (DSM34529). In some embodiments, the second bacterial strain comprises L. crispatus ST100 (DSM33187).

[0017] In the methods of treating a disease or disease condition in a subject in need thereof disclosed herein: In some embodiments, the formulation is formulated in a vaginal dosage form. In some embodiments, the formulation further comprises a pharmaceutically acceptable excipient. In some embodiments, the pharmaceutically acceptable excipient comprises a hydrogel. In some embodiments, the first bacterial strain or the second bacterial strain is configured to exhibit an adherence to a vaginal epithelial cell (VEC) by at least 1×10\hat{ }2 [colony-forming units (CFU)/9.5 centimeter square (cm\hat{ }2)] or by at least 1×10\hat{ }6 log CFU/cm\hat{ }2. In some embodiments, the first bacterial strain or the second bacterial strain is configured to exhibit a growth ratio of at least about 0.1 or at least about 0.5 between (1) the first bacterial strain or the second bacterial strain being cultured in a culture medium comprising a carbon source consisting of glycogen and (2) the first bacterial strain or the second bacterial strain being cultured in a culture medium comprising a carbon source consisting of glucose, respectively. In some embodiments, the vaginal pathogen comprises Prevotella bivia, Atopobium vaginae, Sneathia spp., G. vaginalis, L. iners or a combination thereof. In some embodiments, the first bacterial strain or the second bacterial strain is configured to inhibit a growth of the vaginal pathogen by at least 5% or at least 20%, relative to a growth of the vaginal pathogen not inhibited by the first bacterial strain or the second bacterial strain, respectively. In some embodiments, the formulation comprises a bacterial product generated by the first bacterial strain or the second bacterial strain. In some embodiments, the bacterial product is a fermentation product of the first bacterial strain or the second bacterial strain. In some embodiments, the bacterial product is a secreted metabolite of the first bacterial strain or the second bacterial strain. In some embodiments, the first bacterial strain or the second bacterial strain comprises the Vertebrate-Associated Lactobacillaceae. In some embodiments, the first bacterial strain comprises L. jensenii or L. gasseri. In some embodiments, the first bacterial strain comprise L. jensenii ST21 (DSM34525) or L. gasseri ST105 (DSM34528). In some embodiments, the first bacterial strain comprises at least two bacterial strains In some embodiments, the at least two bacterial strains comprise L. jensenii and L. gasseri. In some embodiments, the at least two bacterial strains comprise L. jensenii ST21 (DSM 34525) and L. gasseri ST105 (DSM34528). In some embodiments, the second bacterial strain comprises L. crispatus. In some embodiments, the second bacterial strain comprises L. crispatus ST100 (DSM33187), L. crispatus ST20 (DSM34527), or L. crispatus ST112 (DSM34529). In some embodiments, the second bacterial strain comprises L. crispatus ST100 (DSM33187).

[0018] In the compositions disclosed herein: In some embodiments, the immune response signaling pathway comprises an inflammatory immune response signaling pathway or an innate immune response signaling pathway, optionally the immune response signaling pathway comprises a toll-like receptor (TLR) signaling pathway. In some embodiments, the TLR signaling pathway comprises TLR4 signaling pathway. In some embodiments, an inhibition of the TLR4 signaling pathway is measured by a nuclear factor kappa-light-chain-enhancer of activated B cells (NFkB) reporter. In some embodiments, the TLR receptor further comprises a ligand. In some embodiments, the ligand comprises lipopolysaccharide (LPS). In some embodiments, the disease or disease condition comprises NEC. In some embodiments, the composition is formulated in a solid dosage form or liquid dosage form. In some embodiments, the liquid dosage form comprises a suspension. In some embodiments, the composition is formulated in oral dosage form. In some embodiments, the composition further comprises a pharmaceutically acceptable excipient In some embodiments, the first bacterial strain or the second bacterial strain is configured to exhibit an adherence to an intestinal epithelial cell (IEC) by at least 1×10\hat{ }4 [colony-forming units (CFU)/9.5 centimeter square (cm\hat{ }2)], optionally by at least 1×10\hat{ }7 log CFU/cm\hat{ }2. In some embodiments, the first bacterial strain or the second bacterial strain is configured to exhibit a growth ratio of about at least about 0.1 or at least 0.7 between (1) the first bacterial strain or the second bacterial strain being cultured a culture medium comprising a carbon source consisting of lactose or human milk oligosaccharide (HMO) and (2) the first bacterial strain or the second bacterial strain being cultured in a culture medium comprising a carbon source consisting of glucose. In some embodiments, the HMO comprises 2′flucosyllaotase (2′-FL), Lacto-N-neotetraose (LNnT), or a combination thereof. In some embodiments, the second bacterial strain is configured to exhibit the growth ratio of at least about at least about 0.1 or at least 0.7 between (1) the second bacterial strain being cultured in the culture medium comprising the carbon source consisting of the lactose or the HMO and (2) the second bacterial strain being cultured in the culture medium comprising the carbon source consisting of the glucose. In some embodiments, the first bacterial strain is configured to exhibit the growth ratio of at most about 10%, or optionally by 50%, between (1) the first bacterial strain being cultured in the culture medium comprising the carbon source consisting of the lactose or the HMO and (2) the first bacterial strain being cultured in the culture medium comprising the carbon source consisting of the glucose. In some embodiments, the first bacterial strain is configured to not exhibit a growth in the culture medium comprising the carbon source consisting of the lactose or the HMO. In some embodiments, the infant gastrointestinal pathogen comprises an opportunistic pathogen. In some embodiments, the infant gastrointestinal pathogen comprises E. coli, K. pneumoniae, C. perfringens, S. aureus, S. flexneri, or a combination thereof. In some embodiments, the infant gastrointestinal pathogen comprises the E. coli. In some embodiments, the first bacterial strain or the second bacterial strain is configured to inhibit a growth of the infant gastrointestinal pathogen by at least 10%, or optionally by at least 50%, relative to growth of the infant gastrointestinal pathogen not inhibited by the first bacterial strain or the second bacterial strain, respectively. In some embodiments, the composition comprises a bacterial product generated by the first bacterial strain or the second bacterial strain. In some embodiments, the bacterial product is a fermentation product or a secreted metabolite of the first bacterial strain or the second bacterial strain. In some embodiments, the bacterial population, when contacted with a barrier comprising intestinal epithelial cells (IECs), increases an impedance of the barrier by at least 0.1%, relative to an impedance of the barrier contacted with a control bacterial population not comprising the first bacterial strain and the second bacterial strain. In some embodiments, the first bacterial strain or the second bacterial strain comprises Bifidobacterium longum, Bifidobacterium pseudocatenulatum, Bifidobacterium breve, Bifidobacterium bifidum, or Lactobacillus plantarum. In some embodiments, the first bacterial strain or the second bacterial strain comprises Bifidobacterium longum ST81 (DSM 34594), Bifidobacterium longum ST23 (DSM 34590), Bifidobacterium pseudocatenulatum ST37 (DSM 34587), Bifidobacterium breve ST71 (DSM 34607), Bifidobacterium longum ST119 (DSM 34608), Bifidobacterium bifidum ST31 (DSM 34533), or Lactobacillus plantarum ST65 (DSM 34526). In some embodiments, the first bacterial strain or the second bacterial strain comprises Bifidobacterium pseudocatenulatum ST37 (DSM 34587), Bifidobacterium breve ST71 (DSM 34607), Bifidobacterium longum ST119 (DSM 34608), Bifidobacterium bifidum ST31 (DSM 34533), or Lactobacillus plantarum ST65 (DSM 34526). In some embodiments, the first bacterial strain or the second bacterial strain comprises Bifidobacterium pseudocatenulatum ST37 (DSM 34587), Bifidobacterium breve ST71 (DSM 34607), Bifidobacterium longum ST119 (DSM 34608), Bifidobacterium bifidum ST31 (DSM 34533), and Lactobacillus plantarum ST65 (DSM 34526). In some embodiments, the second bacterial strain comprises Bifidobacterium bifidum ST31 (DSM 34533).

[0019] In the methods of treating a disease or disease condition in a subject in need thereof disclosed herein: In some embodiments, the immune response signaling pathway comprises an inflammatory immune response signaling pathway or an innate immune response signaling pathway, optionally the immune response signaling pathway comprises a toll-like receptor (TLR) signaling pathway. In some embodiments, the TLR signaling pathway comprises TLR4 signaling pathway. In some embodiments, TLR4 signaling pathway comprises a nuclear factor kappa-light-chain-enhancer of activated B cells (NFkB). In some embodiments, the TLR4 signaling pathway comprises a ligand. In some embodiments, the ligand comprises lipopolysaccharide (LPS). In some embodiments, the disease or disease condition comprises NEC. In some embodiments, the formulation is formulated in a solid dosage form or liquid dosage form. In some embodiments, the liquid dosage form comprises a suspension. In some embodiments, the formulation is formulated in oral dosage form. In some embodiments, the method further comprises a pharmaceutically acceptable excipient In some embodiments, the first bacterial strain or the second bacterial strain is configured to exhibit an adherence to an intestinal epithelial cell (IEC) by at least 1×10\hat{ }4 [colony-forming units (CFU)/9.5 centimeter square (cm\hat{ }2)], optionally by at least 1×10\hat{ }7 log CFU/cm\hat{ }2. In some embodiments, the first bacterial strain or the second bacterial strain is configured to exhibit a growth ratio of about at least about 0.1 or at least 0.7 between (1) the first bacterial strain or the second bacterial strain being cultured a culture medium comprising a carbon source consisting of lactose or human milk oligosaccharide (HMO) and (2) the first bacterial strain or the second bacterial strain being cultured in a culture medium comprising a carbon source consisting of glucose. In some embodiments, the HMO comprises 2′flucosyllaotase (2′-FL), Lacto-N-neotetraose (LNnT), or a combination thereof. In some embodiments, the second bacterial strain is configured to exhibit the growth ratio of at least about at least about 0.1 or at least 0.7 between (1) the second bacterial strain being cultured in the culture medium comprising the carbon source consisting of the lactose or the HMO and (2) the second bacterial strain being cultured in the culture medium comprising the carbon source consisting of the glucose. In some embodiments, the first bacterial strain is configured to exhibit the growth ratio of at most about 0.99 between (1) the first bacterial strain being cultured in the culture medium comprising the carbon source consisting of the lactose or the HMO and (2) the first bacterial strain being cultured in the culture medium comprising the carbon source consisting of the glucose. In some embodiments, the first bacterial strain is configured to not exhibit a growth in the culture medium comprising the carbon source consisting of the lactose or the HMO. In some embodiments, the infant gastrointestinal pathogen comprises an opportunistic pathogen. In some embodiments, the infant gastrointestinal pathogen comprises E. coli, K. pneumoniae, C. perfringens, S. aureus, S. flexneri, or a combination thereof. In some embodiments, the infant gastrointestinal pathogen comprises the E. coli. In some embodiments, the first bacterial strain or the second bacterial strain is configured to inhibit a growth of the infant gastrointestinal pathogen by at least 10%, or optionally by 50%, relative to growth of the infant gastrointestinal pathogen not inhibited by the first bacterial strain or the second bacterial strain, respectively. In some embodiments, the formulation comprises a bacterial product generated by the first bacterial strain or the second bacterial strain. In some embodiments, the bacterial product is a fermentation product or a secreted metabolite of the first bacterial strain or the second bacterial strain. In some embodiments, the bacterial population, when contacted with a barrier comprising intestinal epithelial cells (IECs), increases an impedance of the barrier by at least 0.1%, relative to an impedance of the barrier contacted with a control bacterial population not comprising the first bacterial strain and the second bacterial strain. In some embodiments, the first bacterial strain or the second bacterial strain comprises Bifidobacterium longum, Bifidobacterium pseudocatenulatum, Bifidobacterium breve, Bifidobacterium bifidum, or Lactobacillus plantarum. In some embodiments, the first bacterial strain or the second bacterial strain comprises Bifidobacterium longum ST81 (DSM 34594), Bifidobacterium longum ST23 (DSM 34590), Bifidobacterium pseudocatenulatum ST37 (DSM 34587), Bifidobacterium breve ST71 (DSM 34607), Bifidobacterium longum ST119 (DSM 34608), Bifidobacterium bifidum ST31 (DSM 34533), or Lactobacillus plantarum ST65 (DSM 34526). In some embodiments, the first bacterial strain or the second bacterial strain comprises Bifidobacterium pseudocatenulatum ST37 (DSM 34587), Bifidobacterium breve ST71 (DSM 34607), Bifidobacterium longum ST119 (DSM 34608), Bifidobacterium bifidum ST31 (DSM 34533), or Lactobacillus plantarum ST65 (DSM 34526). In some embodiments, the first bacterial strain or the second bacterial strain comprises Bifidobacterium pseudocatenulatum ST37 (DSM 34587), Bifidobacterium breve ST71 (DSM 34607), Bifidobacterium longum ST119 (DSM 34608), Bifidobacterium bifidum ST31 (DSM 34533), and Lactobacillus plantarum ST65 (DSM 34526). In some embodiments, the second bacterial strain comprises Bifidobacterium bifidum ST31 (DSM 34533).

[0020] In some embodiments, the bacterial population is purified In some embodiments, the composition comprises less than 20 bacterial strains. In some embodiments, the composition comprises at least 3 or at least 4 bacterial strains. In some embodiments, the first bacterial strain comprises at least 2 or at least 3 bacterial strains. In some embodiments, the second bacterial strain comprises at least 2 or at least 3 bacterial strains. In some embodiments, the composition comprises at least about 10\hat{ }2 colony-forming units (CFU) of the first bacterial strain and the second bacterial strain. In some embodiments, the composition comprises at most about 10\hat{ }15 colony-forming units (CFU) of the first bacterial strain and the second bacterial strain. In some embodiments, within the composition, an amount of the first bacterial strain is at least about 5%, 10%, 20%, 50% 100%, 2-fold, 10-fold, or 100-fold higher than an amount of the second bacterial strain. In some embodiments, within the composition, an amount of the first bacterial strain is at most about 5%, 10%, 20%, 50% 100%, 2-fold, 10-fold, or 100-fold higher than an amount of the second bacterial strain. In some embodiments, within the composition, an amount of the first bacterial strain is at least about 5%, 10%, 20%, 50% 100%, 2-fold, 10-fold, or 100-fold lower than an amount of the second bacterial strain. In some embodiments, within the composition, an amount of the first bacterial strain is at most about 5%, 10%, 20%, 50% 100%, 2-fold, 10-fold, or 100-fold lower than an amount of the second bacterial strain.

[0021] Disclosed herein, in some embodiments, are compositions. In an aspect, a composition comprises: a bacterial population comprising a bacterial strain for use in treating an infant gastrointestinal disease in a subject in need thereof, wherein the composition is configured to treat the infant gastrointestinal disease at least in part by inhibiting a growth of an infant gastrointestinal pathogen in the subject by at least 60%, relative to a growth of the infant gastrointestinal pathogen in the subject when not inhibited by the composition.

[0022] Disclosed herein, in some embodiments, are methods of treating an infant gastrointestinal disease in a subject in need thereof. In an aspect, a method of treating an infant gastrointestinal disease in a subject in need thereof comprises: administering to the subject a therapeutically-effective amount of a formulation, wherein the formulation comprises a bacterial population comprising a bacterial strain, wherein (1) the formulation inhibits a growth of an infant gastrointestinal pathogen by at least 60%, relative to a growth of the infant gastrointestinal pathogen when not inhibited by the formulation, or (2) the formulation is configured to treat the infant gastrointestinal disease at least in part by inhibiting a growth of an infant gastrointestinal pathogen in the subject by at least 60%, relative to a growth of the infant gastrointestinal pathogen in the subject formulation not inhibited by the formulation.

[0023] Disclosed herein, in some embodiments, are compositions. In an aspect, a composition comprises: a bacterial population comprising a bacterial strain for use in treating a vaginal disease or a complication associated with the vaginal disease in a subject in need thereof, wherein the composition is formulated for application to a vagina of the subject, and wherein the composition is configured to treat the vaginal disease or the complication associated with the vaginal disease at least in part by inhibiting a vaginal pathogen in the subject by at least 30%, relative to a growth or biofilm formation of the vaginal pathogen in the subject when not inhibited by the composition.

[0024] Disclosed herein, in some embodiments, are methods of a vaginal disease or a complication associated with the vaginal disease in a subject in need thereof. In an aspect, a method of treating a vaginal disease or a complication associated with the vaginal disease in a subject in need thereof comprises administering to the subject a therapeutically-effective amount of a formulation, wherein the formulation comprises a bacterial population comprising a bacterial strain, wherein (1) the formulation inhibits a growth or biofilm formation of a vaginal pathogen by at least 30%, relative to a growth or biofilm formation of the vaginal pathogen when not inhibited by the formulation, or (2) wherein the formulation is configured to treat the vaginal disease or the complication associated with the vaginal disease at least in part by inhibiting a growth or biofilm formation of the vaginal pathogen in the subject by at least 30%, relative to a growth or biofilm formation of the vaginal pathogen in the subject when not inhibited by the formulation.

[0025] Disclosed herein, in some embodiments, are compositions. In an aspect, a composition comprises: a bacterial population comprising a first bacterial strain, wherein when the first bacterial strain is cultured with (1) a second bacterial strain different from the first bacterial strain or (2) a cultured medium of the second bacterial strain: (a) the first bacterial strain inhibits an immune response signaling pathway by at least 10% relative to the immune response signaling pathway when inhibited by a control bacterial strain comprising the first bacterial strain not cultured with (1) the second bacterial strain or (2) the cultured medium of the second bacterial strain, respectively, or (b) a cultured medium of the first bacterial strain inhibits the immune response signaling pathway by at least 10% relative to the immune response signaling pathway when inhibited by a cultured medium of the control bacterial strain, respectively.

[0026] Disclosed herein, in some embodiments, are compositions. In an aspect, a composition comprises: a bacterial population comprising a first bacterial strain and a second bacterial strain different from the first bacterial strain for use in treating a vaginal disease or a complication associated with the vaginal disease in a subject in need thereof, wherein the first bacterial strain and the second bacterial strain are derived from a vagina of a donor, wherein the composition is formulated for application to a vagina of the subject, and wherein the composition is configured to treat the vaginal disease or the complication associated with the vaginal disease at least in part by inhibiting a growth or biofilm formation of a vaginal pathogen in the subject by at least 0.1%, relative to a growth or biofilm formation of the vaginal pathogen in the subject when not inhibited by the composition

[0027] In some embodiments, the donor is a human. In some embodiments, the human is a healthy individual. In some embodiments, the human does not have the vaginal disease or the complication associated with the vaginal disease. In some embodiments, the first bacterial strain and the second bacterial strain are derived from a microbiota of the vagina of the donor.

[0028] Disclosed herein, in some embodiments, are compositions. In an aspect, a composition comprises: a bacterial population comprising a first bacterial strain and a second bacterial strain different from the first bacterial strain, wherein the first bacterial strain and the second bacterial strain are derived from a gastrointestinal tract of a human, and wherein when the first bacterial strain is cultured with (1) the second bacterial strain or (2) a cultured medium of the second bacterial strain: (a) the first bacterial strain inhibits a growth of a gastrointestinal pathogen by at least 0.1% relative to a growth of the gastrointestinal pathogen when inhibited by a control bacterial strain comprising the first bacterial strain not cultured with (1) the second bacterial strain or (2) the cultured medium of the second bacterial strain, respectively, (b) the first bacterial strain inhibits an immune response signaling pathway by at least 0.1% relative to the immune response signaling pathway when inhibited by the control bacterial strain, respectively, (c) a cultured medium of the first bacterial strain inhibits the growth of the gastrointestinal pathogen by at least 0.1% relative to a growth of the gastrointestinal pathogen when inhibited by a cultured medium of the control bacterial strain, respectively, or (d) the cultured medium of the first bacterial strain inhibits the signal of the immune response signaling pathway by at least 0.1% relative to the immune response reporter when inhibited by the cultured medium of the control bacterial strain, respectively.

[0029] In some embodiments, the human is a healthy individual. In some embodiments, the human is an infant. In some embodiments, the infant does not have the infant gastrointestinal disease.

[0030] Disclosed herein, in some embodiments, are compositions. In an aspect, a composition comprises: a bacterial product originating from a culture of: (1) a first bacterial strain and a second bacterial strain different from the first bacterial strain or (2) the first bacterial strain and a cultured medium of the second bacterial strain, wherein the first bacterial strain and the second bacterial strain comprise Bifidobacterium sp. or Vertebrate-Associated Lactobacillaceae, and wherein the bacterial product is configured to inhibit: (a) a growth of or biofilm formation of a pathogen by at least 0.1% relative to a growth of the pathogen when inhibited by a control bacterial metabolite generated by a control culture; or (b) an immune response signaling pathway by at least 0.1% relative to the immune response signaling when inhibited by the control bacterial product generated by the control culture, and wherein the control culture does not comprise the (1) first bacterial strain and (2) the second bacterial strain or the culture medium of the second bacterial strain.

[0031] In some embodiments, the pathogen comprises an infant gastrointestinal pathogen. In some embodiments, the bacterial product is configured to inhibit: (i) a growth of the infant gastrointestinal pathogen by at least 0.1% relative to a growth of the infant gastrointestinal when inhibited by the control bacterial product generated by the control culture; or (ii) a signal of an immune response reporter of the immune response signaling pathway within an engineered cell by at least 0.1% relative to a signal of the immune response reporter of the immune response signaling pathway within the engineered cell when inhibited by the control bacterial product generated by the control culture. In some embodiments, the pathogen comprises a vaginal pathogen. In some embodiments, the bacterial product is configured to inhibit a growth or biofilm formation of the vaginal pathogen by at least 0.1%, relative to a growth or biofilm formation of the vaginal pathogen when inhibited by control bacterial product generated by the control culture. In some embodiments, the bacterial product comprises at least lactic acid hydrogen peroxide, lipoteichoic acid, proteinaceous products, peptide products, short chain fatty acids, immunomodulatory lipids, bacteriocins or a combination thereof. In some embodiments, the bacterial product comprises at least 2, 3, 4, 5 or more bacterial products.

[0032] Disclosed herein, in some embodiments, are compositions. In an aspect, a composition comprises: a bacterial population comprising at least one strain of Bifidobacterium sp. or Vertebrate-Associated Lactobacillaceae, wherein the bacterial population is capable of exhibiting: (a) an increase of adhering to an intestinal epithelial cell (IPC) by at least 0.1%; (b) an increase in an impedance of a barrier comprising IPCs by at least 0.1%; (c) an increase of growth in a medium comprising a human milk oligosaccharide by at least 0.1%; (d) an increase of inhibiting a growth of a pathogen by at least 0.1%; (e) a decrease of an immune response reporter by at least 0.1%; or (f) a combination of (a)-(e), relative to a control bacterial strain comprising B. longum EV27 or L. reuteri BG49.

[0033] Disclosed herein, in some embodiments, are compositions. In an aspect, a composition comprises: at least one of Bifidobacterium bifidum ST31 (DSM34533), Bifidobacterium bifidum ST80 (DSM 34534), Lactobacillus crispatus ST112 (DSM34529), Lactobacillus crispatus ST20 (DSM34527), Lactobacillus gasseri ST105 (DSM34528), Lactobacillus jensenii ST21 (DSM34525), Lactobacillus plantarum ST65 (DSM34526), Bifidobacterium adolescentis ST101 (DSM34592), Bifidobacterium breve ST56 (DSM34588), Bifidobacterium longum ST19 (DSM34589), Bifidobacterium longum ST81 (DSM34594), Bifidobacterium pseudocatenulatum ST37 (DSM34587), Bifidobacterium pseudocatenulatum ST66 (DSM34591), Lactobacillus crispatus ST100 (DSM33187), Lactobacillus rhamnosus ST116 (DSM34593), Bifidobacterium longum ST23 (DSM34590), Bifidobacterium breve ST71 (DSM34607), or Bifidobacterium longum ST119 (DSM34608).

[0034] In some embodiments, the composition comprises at least two of Bifidobacterium bifidum ST31 (DSM34533), Bifidobacterium bifidum ST80 (DSM 34534), Lactobacillus crispatus ST112 (DSM34529), Lactobacillus crispatus ST20 (DSM34527), Lactobacillus gasseri ST105 (DSM34528), Lactobacillus jensenii ST21 (DSM34525), Lactobacillus plantarum ST65 (DSM34526), Bifidobacterium adolescentis ST101 (DSM34592), Bifidobacterium breve ST56 (DSM34588), Bifidobacterium longum ST19 (DSM34589), Bifidobacterium longum ST81 (DSM34594), Bifidobacterium pseudocatenulatum ST37 (DSM34587), Bifidobacterium pseudocatenulatum ST66 (DSM34591), Lactobacillus crispatus ST100 (DSM33187), Lactobacillus rhamnosus ST116 (DSM34593), Bifidobacterium longum ST23 (DSM34590), Bifidobacterium breve ST71 (DSM34607), or Bifidobacterium longum ST119 (DSM34608). In some embodiments, the composition is formulated in an oral or vaginal dosage form. In some embodiments, the composition comprises at least about 10\hat{ }2 colony-forming units per strain.

[0035] Disclosed herein, in some embodiments, are methods for generating a bacterial combination. In an aspect, a method for generating a bacterial combination comprises: (a) providing a first bacterial strain; (b) generating a plurality of cultures, each comprising the first bacterial strain and: (1) a given bacterial strain of a plurality of bacterial strains or (2) a metabolite generated by the given bacterial strain; (c) determining a culture of the plurality of cultures of (b) that is capable of (i) inhibiting a growth or biofilm formation of a vaginal pathogen by at least 0.1% relative to a growth of or biofilm formation of the vaginal pathogen inhibited by a control culture; (ii) inhibiting a signal of an immune response reporter by at least 0.1% relative to a signal of the immune response reporter inhibited by the control culture; or (iii) inhibiting a growth of an infant gastrointestinal pathogen by at least 0.1% relative to a growth of the infant gastrointestinal pathogen inhibited by the control culture, wherein the control culture does not comprise the first bacterial strain and (1) the given bacterial strain or (2) the metabolite generated by the given bacterial strain, thereby identifying the given bacterial strain to generate the bacterial combination comprising the first bacterial strain and the given bacterial strain.

[0036] Disclosed herein, in some embodiments, are pharmaceutical compositions. In an aspect, a pharmaceutical composition comprises a bacterial population comprising a first bacterial strain and a second bacterial strain, wherein the first bacterial strain and the second bacterial strain are different from one another, wherein the bacterial population comprises Bifidobacterium sp. or Vertebrate-Associated Lactobacillaceae, wherein the first bacterial strain, when present within: (1) a medium comprising an energy source and the second bacterial strain or (2) a supernatant of the medium comprising the energy source and the second bacterial strain, exhibits a growth of at least about 105% by weight as compared to a growth of the first bacterial strain when present in a medium comprising the energy source in an absence of the second bacterial strain or the supernatant of the medium comprising the energy source and the second bacterial strain, and wherein the energy source comprises a human milk oligosaccharide (HMO) or does not comprise starch.

[0037] In some embodiments, the supernatant of the medium comprising the energy source and the second bacterial strain is cell-free. In some embodiments, the supernatant of the medium comprising the energy source and the second bacteria strain comprises a fermentation product derived from the second bacterial strain. In some embodiments, the first bacterial strain, when present within (1) the medium comprising the energy source and the second bacterial strain or (2) the supernatant of the medium comprising the energy source and the second bacterial strain, exhibits a growth for at most about 48 hours, at most about 24 hours, or at most about 12 hours of at least about 105% by weight as compared to a growth of the first bacterial strain when present within the medium comprising the energy source in an absence of the second bacterial strain or the supernatant of the medium comprising the energy source and the second bacterial strain for at most about 48 hours, at most about 24 hours, or at most about 12 hours, respectively. In some embodiments, the first bacterial strain, when present within (1) the medium comprising the energy source and the second bacterial strain or (2) the supernatant of the medium comprising the energy source and the second bacteria strain, exhibits the growth of at least about 150%, at least about 1000%, or at least about 10000%, by weight as compared to the growth of the first bacterial strain when present within the medium comprising the energy source in an absence of the second bacterial strain or the supernatant of the medium comprising the energy source and the second bacteria strain. In some embodiments, the first bacterial strain or the second bacterial strain does not comprise a recombinant genetic modification, optionally wherein each of the first bacterial strain and the second bacterial strain does not comprise the recombinant genetic modification. In some embodiments, the pharmaceutical composition is formulated in an enteral dosage form, an injectable dosage form, a parenteral dosage form, a topical dosage form, or a combination thereof, optionally wherein the enteral dosage form comprises an oral dosage form, an intragastric dosage form, or a rectal dosage form. In some embodiments, the Vertebrate-Associated Lactobacillaceae comprises Vertebrate-Associated Lactobacillaceae, LimosiVertebrate-Associated Lactobacillaceae, LigiVertebrate-Associated Lactobacillaceae, Lacticaseibacillus sp., or a combination thereof. In some embodiments, the Vertebrate-Associated Lactobacillaceae comprises Lactobacillus crispatus, Lactobacillus gasseri, Limosilactobacillus vaginalis, Limosilactobacillus fermentum, Lactobacillus plantarum, Lactobacillus jensenii, Lacticaseibacillus paracasei, or a combination thereof. In some embodiments, the Bifidobacterium sp. comprises B. animalis, B. pseudocatenulatum, B. bifidum, B. breve, B. dentium, B. faecale, B. longum, or a combination thereof. In some embodiments, the first bacteria strain comprises the Bifidobacterium sp. or the Vertebrate-Associated Lactobacillaceae. In some embodiments, second bacteria strain comprises the Bifidobacterium sp. or the Vertebrate-Associated Lactobacillaceae. In some embodiments, the energy source does not comprise the starch, optionally wherein the starch is not a modified starch, fermented starch, a dextrin, or a maltodextrin. In some embodiments, the energy source comprises the HMO, optionally wherein the HMO comprises fructooligosaccharides (FOS), guar gum, corn syrup, polydextrose, Galacto-Oligosaccharides (GOS), lactose, inulin, mucin, sialic acid, glucan, fructose, N-Acetylglucosamine (GlcNAc), mannose, Lacto-N-neotetraose (LNnT), glucose, 2′-Fucosyllactose (2′-FL), galactose, fructose, pectin, or a combination thereof.

[0038] Disclosed herein, in some embodiments, are pharmaceutical compositions. In an aspect, a pharmaceutical composition comprises a bacterial population comprising a bacterial strain, wherein the bacterial population comprises Bifidobacterium sp. or Vertebrate-Associated Lactobacillaceae, and wherein a metabolite or an inviable cell derived from the bacterial strain, when combined with an engineered cell comprising a reporter, decreases a signal of the reporter by at least about 5% as compared to a signal of the reporter when the engineered cell is not combined with the metabolite or the inviable cell derived from the bacterial strain.

[0039] In some embodiments, a medium comprising the metabolite or the inviable cells derived from the bacterial strain comprises a supernatant derived from a growth culture of the bacterial strain, optionally wherein the supernatant derived from the growth culture of the bacterial strain is cell-free. In some embodiments, the medium comprising the metabolite or the inviable cells derived from the bacterial strain comprises a fermentation product derived from a growth culture of the bacterial strain. In some embodiments, the bacterial strain does not comprise a recombinant genetic modification. In some embodiments, the metabolite is not a cluster of differentiation 4 (CD4) peptide or a fragment thereof. In some embodiments, the engineered cell comprises an engineered immune cell, optionally wherein the engineered immune cell comprises a macrophage. In some embodiments, the reporter comprises an immune response reporter. In some embodiments, the reporter comprises a nuclear factor kappa-light-chain-enhancer of activated B cells (NFkB) reporter or an interferon-sensitive response element reporter (ISRE), optionally wherein the NFkB reporter comprises a secreted embryonic alkaline phosphatase (SEAP) reporter or the ISRE reporter comprises a Lucia luciferase. In some embodiments, the metabolite or the inviable cell derived from the bacterial strain, when combined with the engineered cell comprising the reporter, decreases the signal of the reporter by at least about 10% or at least about 50% as compared to when the engineered cell is not combined with the metabolite or the inviable cell derived from the bacterial strain. In some embodiments, the pharmaceutical composition is formulated in an enteral dosage form, an injectable dosage form, a parenteral dosage form, a topical dosage form, or a combination thereof. In some embodiments, the enteral dosage form comprises an oral dosage form, an intragastric dosage form, or a rectal dosage form, optionally wherein the intragastric dosage form comprises a dosage form that is configured to pass through a feeding tube. In some embodiments, the bacteria strain comprises the Bifidobacterium sp, optionally wherein the Bifidobacterium sp. comprises B. animalis, B. pseudocatenulatum, B. bifidum, B. breve, B. dentium, B. faecale, B. longum, or a combination thereof. In some embodiments, the bacteria strain comprises the Vertebrate-Associated Lactobacillaceae, optionally wherein the Vertebrate-Associated Lactobacillaceae comprises Vertebrate-Associated Lactobacillaceae, LimosiVertebrate-Associated Lactobacillaceae, LigiVertebrate-Associated Lactobacillaceae, Lacticaseibacillus sp., or a combination thereof. In some embodiments, the Vertebrate-Associated Lactobacillaceae comprises Lactobacillus crispatus, Lactobacillus gasseri, Limosilactobacillus vaginalis, Limosilactobacillus fermentum, Lactobacillus plantarum, Lactobacillus jensenii, Lacticaseibacillus paracasei, or a combination thereof.

[0040] Disclosed herein, in some embodiments, are methods. In an aspect, a method comprises administering the pharmaceutical composition disclosed herein to a subject. In some embodiments, the subject has bacterial vaginosis (BV) or necrotizing enterocolitis (NEC) or a risk of the BV or a risk of the NEC. In some embodiments, the subject has the BV or the risk of the BV, optionally wherein the subject has a microbial dysbiosis in a vagina of the subject. In some embodiments, the subject is at least about 10 years old or at most about 120 years old. In some embodiments, the subject has the NEC or the risk of the NEC, optionally wherein the subject has a microbial dysbiosis in a gastrointestinal tract of the subject. In some embodiments, the subject is at most about 1 year old or at least about 1 day old, optionally wherein the subject is a premature infant.

[0041] Disclosed herein, in some embodiments, are methods. In an aspect, a method comprises: (a) providing a plurality of bacterial strains; (b) culturing a given bacterial strain of the plurality of bacterial strains in a carbon source or a plurality of carbon sources; (c) measuring growth of the plurality of bacterial strains; and (d) selecting a bacterial strain of the plurality of bacteria strains, wherein the plurality of bacterial strains comprises Bifidobacterium sp. or Vertebrate-Associated Lactobacillaceae, wherein the bacterial strain, when present within (1) a medium comprising the carbon source and a second bacterial strain or (2) a supernatant of the medium comprising the carbon source and the second bacteria strain, exhibits a growth of at least about 105% by weight as compared to a growth of the first bacterial strain when present within a medium comprising the carbon source in an absence of the second bacterial strain or the supernatant of the medium comprising the carbon source and the second bacteria strain, and wherein the carbon source comprises human milk oligosaccharide (HMO) or does not comprise starch.

[0042] Disclosed herein, in some embodiments, are methods. In an aspect, a method comprises: (a) providing a plurality of bacterial strains; (b) culturing a given bacterial strain of the plurality of bacterial strains in a carbon source of a plurality of carbon sources; (c) measuring growth of the plurality of bacterial strains; and (d) selecting a bacterial strain of the plurality of bacteria strains, wherein the plurality of bacterial strains comprises Bifidobacterium sp. or Vertebrate-Associated Lactobacillaceae, wherein a metabolite or an inviable cell derived from the bacterial strain, when combined with an engineered cell comprising a reporter, decreases a signal of the reporter by at least about 5% as compared to a signal of the reporter when the engineered cell is not combined with the metabolite or the inviable cell derived from the bacterial strain.

[0043] Disclosed herein, in some embodiments, are pharmaceutical compositions. In an aspect, a pharmaceutical composition comprises i. a purified bacterial population comprising a bacterial population comprising a first bacterial strain and a second bacterial strain, wherein i. the first bacterial strain and the second bacterial strain are different from one another, ii. the bacterial population comprises Bifidobacterium sp. or Vertebrate-Associated Lactobacillaceae, iii. the first bacterial strain, when present in a medium comprising an energy source and a second bacterial strain or a supernatant of the medium comprising the energy source and the second bacterial strain, exhibits a growth of at least about 105% by weight as compared to growth of the first bacterial strain when present in a medium comprising the energy source in an absence of the second bacterial strain or the supernatant of the medium comprising the energy source and the second bacterial strain, and iv. wherein the energy source does not comprise starch.

[0044] In some embodiments, the supernatant of the medium comprising the energy source and the second bacteria can be cell-free, or a fermentation product derived from the second bacterial strain. In some embodiments, the first bacterial strain when present within the medium comprising the energy source and the second bacterial strain or the supernatant of the medium comprising the energy source and the second bacterial strain, exhibits a growth for at most about 48 hours, 24 hours, or 12 hours of at least about 105%, or at least 150%, or at least 1000%, or at least 10000% by weight as compared to a growth of the first bacterial strain when present within the medium comprising the energy source in an absence of the second bacterial strain or the supernatant of the medium comprising the energy source and the second bacterial strain for at most about 48 hours.

[0045] In some embodiments, a pharmaceutically acceptable dosage form can include an injectable dosage form, parenteral dosage form, topical dosage form, or a combination thereof. In some embodiments, the enteral dosage form can comprise an oral dosage form, intragastric dosage form, or rectal dosage form. In some embodiments, the intragastric dosage form can comprise a dosage form that is configured to pass through a feeding tube.

[0046] In some embodiments, the bacterial genus Lactobacillaceae can comprise strains Vertebrate-Associated Lactobacillaceae, LimosiVertebrate-Associated Lactobacillaceae, LigiVertebrate-Associated Lactobacillaceae, Lacticaseibacillus sp., Lactobacillus crispatus, Lactobacillus gasseri, Limosilactobacillus vaginalis, Limosilactobacillus fermentum, Lactobacillus plantarum, Lactobacillus jensenii, Lacticaseibacillus paracasei, or a combination thereof. In some embodiments, the bacterial genus the Bifidobacterium can comprise strains B. animalis, B. pseudocatenulatum, B. bifidum, B. breve, B. dentium, B. faecale, B. longum, or a combination thereof. In some embodiments, the first bacterial strain can comprise the Bifidobacterium sp. or the Lactobacillaceae sp. In some embodiments, the second bacterial strain can comprise the Bifidobacterium sp. or the Lactobacillaceae sp.

[0047] In some embodiments, the starch is not a modified starch. In some embodiments, the starch is not a fermented starch. In some embodiments, the fermented starch is not a dextrin. In some embodiments, the dextrin is not a maltodextrin. In some embodiments, the energy source can comprise fructooligosaccharides (FOS), guar gum, corn syrup, polydextrose, Galacto-Oligosaccharides (GOS), lactose, inulin, mucin, sialic acid, glucan, fructose, N-Acetylglucosamine (GlcNAc), mannose, Lacto-N-neotetraose (LNnT), glucose, 2′-Fucosyllactose (2′-FL), galactose, fructose, pectin, or a combination thereof. In some embodiments, the pharmaceutical composition can comprise a pharmaceutically acceptable excipient, cryoprotectant, or combination thereof.

[0048] In some embodiments, the pharmaceutical composition can comprise a bacterial population comprising at least one strain of Bifidobacterium sp., at least one strain of Lactobacillus sp., at least one strain of Akkermansia sp., at least one strain of Anaerbutyricum sp., at least one strain of Anaerostipes sp., at least one strain of Anaerotignum sp., at least one strain of Bacillus sp., at least one strain of Bacteroides sp., at least one strain of Blautia sp., at least one strain of Clostridium sp., at least one strain of Coprococcus sp., Dorea sp., Enterococcus sp., at least one strain of Erysipelatoclostridium sp., at least one strain of Escherichia sp., at least one strain of Eubacterium sp., at least one strain of Faecalibacterium sp., at least one strain of Faecalicatena sp., at least one strain of Holdemanella sp., at least one strain of Lachnospira sp., at least one strain of Longibaculum sp., at least one strain of Paraprevotella sp., at least one strain of Parabacteroides sp., at least one strain of Pediococcus sp., at least one strain of Roseburia sp., at least one strain of Ruminococcus sp., or at least one strain of Veillonella sp., or a combination thereof.

[0049] Disclosed herein, in some embodiments, are pharmaceutical compositions. In some aspects, the pharmaceutical composition can comprise a bacterial population comprising a first bacterial strain and a second bacterial strain, wherein i. the first bacterial strain and the second bacterial strain are different from one another, ii. wherein the bacterial population comprises Bifidobacterium sp. or Vertebrate-Associated Lactobacillaceae, and iii. wherein the first bacterial strain, when present within a medium comprising a secreted metabolite derived from the second bacterial strain, proliferates for at least about 10 cell divisions.

[0050] In some embodiments, the the first bacterial strain can proliferate within a medium comprising a secreted metabolite derived from the second bacterial strain. In some embodiments, the supernatant derived from the growth culture of the bacterial strain can be cell-free. In some embodiments, the first bacterial strain can proliferate within the medium comprising the secreted metabolite derived from the second bacterial strain for at least about 10, 15, 20, or 32 cell divisions in at most 12, 24, or 48 hours. In some embodiments, the secreted metabolite can be a supernatant derived from a growth culture of a second bacterial strain. In some embodiments, a pharmaceutically acceptable dosage form can include an injectable dosage form, parenteral dosage form, topical dosage form, or a combination thereof. In some embodiments, the enteral dosage form can comprise an oral dosage form, intragastric dosage form, or rectal dosage form. In some embodiments, the intragastric dosage form can comprise a dosage form that is configured to pass through a feeding tube.

[0051] In some embodiments, the bacterial genus Lactobacillaceae can comprise strains Vertebrate-Associated Lactobacillaceae, LimosiVertebrate-Associated Lactobacillaceae, LigiVertebrate-Associated Lactobacillaceae, Lacticaseibacillus sp., Lactobacillus crispatus, Lactobacillus gasseri, Limosilactobacillus vaginalis, Limosilactobacillus fermentum, Lactobacillus plantarum, Lactobacillus jensenii, Lacticaseibacillus paracasei, or a combination thereof. In some embodiments, the bacterial genus the Bifidobacterium can comprise strains B. animalis, B. pseudocatenulatum, B. bifidum, B. breve, B. dentium, B. faecale, B. longum, or a combination thereof. In some embodiments, the first bacterial strain can comprise the Bifidobacterium sp. or the Lactobacillaceae sp. In some embodiments, the second bacterial strain can comprise the Bifidobacterium sp. or the Lactobacillaceae sp.

[0052] In some embodiments, the pharmaceutical composition can comprise a bacterial population comprising at least one strain of Bifidobacterium sp., at least one strain of Lactobacillus sp., at least one strain of Akkermansia sp., at least one strain of Anaerbutyricum sp., at least one strain of Anaerostipes sp., at least one strain of Anaerotignum sp., at least one strain of Bacillus sp., at least one strain of Bacteroides sp., at least one strain of Blautia sp., at least one strain of Clostridium sp., at least one strain of Coprococcus sp., Dorea sp., Enterococcus sp., at least one strain of Erysipelatoclostridium sp., at least one strain of Escherichia sp., at least one strain of Eubacterium sp., at least one strain of Faecalibacterium sp., at least one strain of Faecalicatena sp., at least one strain of Holdemanella sp., at least one strain of Lachnospira sp., at least one strain of Longibaculum sp., at least one strain of Paraprevotella sp., at least one strain of Parabacteroides sp., at least one strain of Pediococcus sp., at least one strain of Roseburia sp., at least one strain of Ruminococcus sp., or at least one strain of Veillonella sp., or a combination thereof.

[0053] In some embodiments, the energy source can comprise fructooligosaccharides (FOS), guar gum, corn syrup, polydextrose, Galacto-Oligosaccharides (GOS), lactose, inulin, mucin, sialic acid, glucan, fructose, N-Acetylglucosamine (GlcNAc), mannose, Lacto-N-neotetraose (LNnT), glucose, 2′-Fucosyllactose (2′-FL), galactose, fructose, pectin, starch, or a combination thereof. In some embodiments, the starch is not a fermented starch. In some embodiments, the starch can comprise a modified starch. In some embodiments, the modified starch can comprise a fermented starch. fermented starch can comprise a dextrin. In some embodiments, the dextrin can comprise a maltodextrin. In some embodiments, the pharmaceutical composition can comprise a pharmaceutically acceptable excipient, cryoprotectant, or combination thereof.

[0054] Disclosed herein, in some embodiments, are pharmaceutical compositions. In some aspects, the pharmaceutical composition can comprise a bacterial population comprising a first bacterial strain and a second bacterial strain, wherein i. the first bacterial strain and the second bacterial strain are different from one another, ii. wherein the bacterial population comprises Bifidobacterium sp. or Vertebrate-Associated Lactobacillaceae, iii. wherein the first bacterial strain, when present within a medium comprising a secreted metabolite derived from the second bacterial strain and a layer of epithelial cells, can decrease permeability of the layer of epithelial cells by at least about 5%, as compared to permeability of a layer of epithelial cells present within a medium comprising the first bacterial strain in an absence of the secreted metabolite, and wherein the permeability of the layer of epithelial cells is measured by transport of a Fluorescein isothiocyanate (FITC)-conjugated dextran or by transepithelial electrical resistance across the layer of epithelial cells.

[0055] In some embodiments, the medium comprising the secreted metabolite derived from the second bacterial strain can comprise a supernatant derived from a growth culture of the second bacterial strain. In some embodiments, the supernatant derived from a growth culture of a second bacterial strain can be cell-free. In some embodiments, the secreted metabolite supernatant can decrease permeability of epithelial cells by at least about 5%, 10%, 20%, 50%, or more than 50% as compared to permeability of a layer of epithelial cells present within a medium comprising the first bacterial strain in an absence of the secreted metabolite. In some embodiments, the epithelial cells can comprise mammalian epithelial cells. In some embodiments, the mammalian epithelial cells can comprise human epithelial cells.

[0056] In some embodiments, the bacterial genus Lactobacillaceae can comprise strains Vertebrate-Associated Lactobacillaceae, LimosiVertebrate-Associated Lactobacillaceae, LigiVertebrate-Associated Lactobacillaceae, Lacticaseibacillus sp., Lactobacillus crispatus, Lactobacillus gasseri, Limosilactobacillus vaginalis, Limosilactobacillus fermentum, Lactobacillus plantarum, Lactobacillus jensenii, Lacticaseibacillus paracasei, or a combination thereof. In some embodiments, the bacterial genus the Bifidobacterium can comprise strains B. animalis, B. pseudocatenulatum, B. bifidum, B. breve, B. dentium, B. faecale, B. longum, or a combination thereof. In some embodiments, the first bacterial strain can comprise the Bifidobacterium sp. or the Lactobacillaceae sp. In some embodiments, the second bacterial strain can comprise the Bifidobacterium sp. or the Lactobacillaceae sp.

[0057] In some embodiments, the pharmaceutical composition can comprise a bacterial population comprising at least one strain of Bifidobacterium sp., at least one strain of Lactobacillus sp., at least one strain of Akkermansia sp., at least one strain of Anaerbutyricum sp., at least one strain of Anaerostipes sp., at least one strain of Anaerotignum sp., at least one strain of Bacillus sp., at least one strain of Bacteroides sp., at least one strain of Blautia sp., at least one strain of Clostridium sp., at least one strain of Coprococcus sp., Dorea sp., Enterococcus sp., at least one strain of Erysipelatoclostridium sp., at least one strain of Escherichia sp., at least one strain of Eubacterium sp., at least one strain of Faecalibacterium sp., at least one strain of Faecalicatena sp., at least one strain of Holdemanella sp., at least one strain of Lachnospira sp., at least one strain of Longibaculum sp., at least one strain of Paraprevotella sp., at least one strain of Parabacteroides sp., at least one strain of Pediococcus sp., at least one strain of Roseburia sp., at least one strain of Ruminococcus sp., or at least one strain of Veillonella sp., or a combination thereof.

[0058] In some embodiments, the energy source can comprise fructooligosaccharides (FOS), guar gum, corn syrup, polydextrose, Galacto-Oligosaccharides (GOS), lactose, inulin, mucin, sialic acid, glucan, fructose, N-Acetylglucosamine (GlcNAc), mannose, Lacto-N-neotetraose (LNnT), glucose, 2′-Fucosyllactose (2′-FL), galactose, fructose, pectin, starch, or a combination thereof. In some embodiments, the starch is not a fermented starch. In some embodiments, the starch can comprise a modified starch. In some embodiments, the modified starch can comprise a fermented starch. fermented starch can comprise a dextrin. In some embodiments, the dextrin can comprise a maltodextrin. In some embodiments, the pharmaceutical composition can comprise a pharmaceutically acceptable excipient, cryoprotectant, or combination thereof.

[0059] In some embodiments, a pharmaceutically acceptable dosage form can include an injectable dosage form, parenteral dosage form, topical dosage form, or a combination thereof. In some embodiments, the enteral dosage form can comprise an oral dosage form, intragastric dosage form, or rectal dosage form. In some embodiments, the intragastric dosage form can comprise a dosage form that is configured to pass through a feeding tube.

[0060] Disclosed herein, in some embodiments, are pharmaceutical compositions. In some aspects, the pharmaceutical composition can comprise a bacterial population comprising a first bacterial strain and a second bacterial strain, wherein i. the first bacterial strain and the second bacterial strain are different from one another, ii. wherein the bacterial population comprises Bifidobacterium sp. or Vertebrate-Associated Lactobacillaceae, iii. wherein a secreted metabolite or an inviable cell derived from the bacterial strain, when combined with an engineered cell comprising a reporter, decreases a signal of the reporter by at least about 5% as compared to a signal of the reporter when the engineered cell is not combined with the metabolite or the inviable cell derived from the bacterial strain.

[0061] In some embodiments, the medium comprising the secreted metabolite or the inviable cells derived from the bacterial strain can comprise a supernatant derived from a growth culture of the bacterial strain. In some embodiments, the supernatant can be cell-free. In some embodiments, the medium comprising the secreted metabolite or the inviable cells derived from the bacterial strain can comprise a fermentation product derived from a growth culture of the bacterial strain. In some embodiments, the secreted metabolite derived from the bacterial strain can comprise a fermentation product derived from the bacterial strain. In some embodiments, the engineer cell can comprise a macrophage. In some embodiments, the inviable cell can comprise a pasteurized cell.

[0062] In some embodiments, the reporter can comprise a nuclear factor kappa-light-chain-enhancer of activated B cells (NFkB) reporter or an interferon-sensitive response element reporter (ISRE). In some embodiments, the NFkB reporter may comprise secreted embryonic alkaline phosphatase (SEAP) reporter. In some embodiments, the ISRE reporter may comprise a Lucia luciferase. In some embodiments, the secreted metabolite or inviable cell derived from the bacterial strain, when combined with the engineered cell, can decrease a signal of the reporter by at least about 5%, at least about 10%, or at least about 50%, or at least about more than 50% as compared to when the engineered cell is not combined with the metabolite or the inviable cell derived from the bacterial strain.

[0063] In some embodiments, a pharmaceutically acceptable dosage form can include an injectable dosage form, parenteral dosage form, topical dosage form, or a combination thereof. In some embodiments, the enteral dosage form can comprise an oral dosage form, intragastric dosage form, or rectal dosage form. In some embodiments, the intragastric dosage form can comprise a dosage form that is configured to pass through a feeding tube.

[0064] In some embodiments, the bacterial genus Lactobacillaceae can comprise strains Vertebrate-Associated Lactobacillaceae, LimosiVertebrate-Associated Lactobacillaceae, LigiVertebrate-Associated Lactobacillaceae, Lacticaseibacillus sp., Lactobacillus crispatus, Lactobacillus gasseri, Limosilactobacillus vaginalis, Limosilactobacillus fermentum, Lactobacillus plantarum, Lactobacillus jensenii, Lacticaseibacillus paracasei, or a combination thereof. In some embodiments, the bacterial genus the Bifidobacterium can comprise strains B. animalis, B. pseudocatenulatum, B. bifidum, B. breve, B. dentium, B. faecale, B. longum, or a combination thereof. In some embodiments, the first bacterial strain can comprise the Bifidobacterium sp. or the Lactobacillaceae sp. In some embodiments, the second bacterial strain can comprise the Bifidobacterium sp. or the Lactobacillaceae sp.

[0065] In some embodiments, the pharmaceutical composition can comprise a bacterial population comprising at least one strain of Bifidobacterium sp., at least one strain of Lactobacillus sp., at least one strain of Akkermansia sp., at least one strain of Anaerbutyricum sp., at least one strain of Anaerostipes sp., at least one strain of Anaerotignum sp., at least one strain of Bacillus sp., at least one strain of Bacteroides sp., at least one strain of Blautia sp., at least one strain of Clostridium sp., at least one strain of Coprococcus sp., Dorea sp., Enterococcus sp., at least one strain of Erysipelatoclostridium sp., at least one strain of Escherichia sp., at least one strain of Eubacterium sp., at least one strain of Faecalibacterium sp., at least one strain of Faecalicatena sp., at least one strain of Holdemanella sp., at least one strain of Lachnospira sp., at least one strain of Longibaculum sp., at least one strain of Paraprevotella sp., at least one strain of Parabacteroides sp., at least one strain of Pediococcus sp., at least one strain of Roseburia sp., at least one strain of Ruminococcus sp., or at least one strain of Veillonella sp., or a combination thereof.

[0066] In some embodiments, the energy source can comprise fructooligosaccharides (FOS), guar gum, corn syrup, polydextrose, Galacto-Oligosaccharides (GOS), lactose, inulin, mucin, sialic acid, glucan, fructose, N-Acetylglucosamine (GlcNAc), mannose, Lacto-N-neotetraose (LNnT), glucose, 2′-Fucosyllactose (2′-FL), galactose, fructose, pectin, starch, or a combination thereof. In some embodiments, the starch is not a fermented starch. In some embodiments, the starch can comprise a modified starch. In some embodiments, the modified starch can comprise a fermented starch. fermented starch can comprise a dextrin. In some embodiments, the dextrin can comprise a maltodextrin. In some embodiments, the pharmaceutical composition can comprise a pharmaceutically acceptable excipient, cryoprotectant, or combination thereof.

[0067] Disclosed herein, in some embodiments, are pharmaceutical compositions. In some aspects, the pharmaceutical composition can comprise a bacterial population comprising a first bacterial strain and a second bacterial strain, wherein i. the first bacterial strain and the second bacterial strain are different from one another, ii. wherein the bacterial population comprises Bifidobacterium sp. or Vertebrate-Associated Lactobacillaceae, and iii. wherein the first bacterial strain, when present within a medium comprising the second bacterial strain or a supernatant thereof for at most about 15 hours, can exhibit a growth of at least about 105% by colony-forming unit (CFU) as compared to a growth of the first bacterial strain when present within a medium not comprising the second bacterial strain or the supernatant thereof for at most about 15 hours.

[0068] In some embodiments, the medium comprising the second bacterial strain or the supernatant thereof can comprise a secreted metabolite derived from the second bacterial strain. In some embodiments, the secreted metabolite derived from the second bacterial strain can comprise a fermentation product of derived from the second bacterial strain. In some embodiments, the supernatant of the medium comprising the second bacterial strain can be cell-free.

[0069] In some embodiments, the first bacterial strain, when present within a medium comprising the second bacterial strain or a supernatant thereof for at most about 15, 10, or 8 hours, can exhibit a growth of at least about 105%, at least about 110%, at least about 120%, at least about 150%, at least 200%, or at least about more than 200% by CFU as compared to a growth of the first bacterial strain when present within a medium not comprising the second bacterial strain or the supernatant thereof.

[0070] In some embodiments, the bacterial genus Lactobacillaceae can comprise strains Vertebrate-Associated Lactobacillaceae, LimosiVertebrate-Associated Lactobacillaceae, LigiVertebrate-Associated Lactobacillaceae, Lacticaseibacillus sp., Lactobacillus crispatus, Lactobacillus gasseri, Limosilactobacillus vaginalis, Limosilactobacillus fermentum, Lactobacillus plantarum, Lactobacillus jensenii, Lacticaseibacillus paracasei, or a combination thereof. In some embodiments, the bacterial genus the Bifidobacterium can comprise strains B. animalis, B. pseudocatenulatum, B. bifidum, B. breve, B. dentium, B. faecale, B. longum, or a combination thereof. In some embodiments, the first bacterial strain can comprise the Bifidobacterium sp. or the Lactobacillaceae sp. In some embodiments, the second bacterial strain can comprise the Bifidobacterium sp. or the Lactobacillaceae sp.

[0071] In some embodiments, the pharmaceutical composition can comprise a bacterial population comprising at least one strain of Bifidobacterium sp., at least one strain of Lactobacillus sp., at least one strain of Akkermansia sp., at least one strain of Anaerbutyricum sp., at least one strain of Anaerostipes sp., at least one strain of Anaerotignum sp., at least one strain of Bacillus sp., at least one strain of Bacteroides sp., at least one strain of Blautia sp., at least one strain of Clostridium sp., at least one strain of Coprococcus sp., Dorea sp., Enterococcus sp., at least one strain of Erysipelatoclostridium sp., at least one strain of Escherichia sp., at least one strain of Eubacterium sp., at least one strain of Faecalibacterium sp., at least one strain of Faecalicatena sp., at least one strain of Holdemanella sp., at least one strain of Lachnospira sp., at least one strain of Longibaculum sp., at least one strain of Paraprevotella sp., at least one strain of Parabacteroides sp., at least one strain of Pediococcus sp., at least one strain of Roseburia sp., at least one strain of Ruminococcus sp., or at least one strain of Veillonella sp., or a combination thereof.

[0072] In some embodiments, the energy source can comprise fructooligosaccharides (FOS), guar gum, corn syrup, polydextrose, Galacto-Oligosaccharides (GOS), lactose, inulin, mucin, sialic acid, glucan, fructose, N-Acetylglucosamine (GlcNAc), mannose, Lacto-N-neotetraose (LNnT), glucose, 2′-Fucosyllactose (2′-FL), galactose, fructose, pectin, starch, or a combination thereof. In some embodiments, the starch is not a fermented starch. In some embodiments, the starch can comprise a modified starch. In some embodiments, the modified starch can comprise a fermented starch. fermented starch can comprise a dextrin. In some embodiments, the dextrin can comprise a maltodextrin. In some embodiments, the pharmaceutical composition can comprise a pharmaceutically acceptable excipient, cryoprotectant, or combination thereof.

[0073] Disclosed herein, in some embodiments, are pharmaceutical compositions. In some aspects, the pharmaceutical composition can comprise a bacterial population comprising at least one strain of Bifidobacterium sp. or Vertebrate-Associated Lactobacillaceae, wherein the bacterial population, when present within a medium comprising sialic acid, does not exhibit a growth of at least about 105% by weight as compared to a growth of a reference bacterial population when present within a medium comprising glucose.

[0074] In some embodiments, the bacterial population, when present within the medium comprising the sialic acid, may not exhibit the growth of at least about 105%, at least about 120%, at least about 150%, at least about 1000%, or at least about more than 1000% by weight as compared to the growth of the reference bacterial population when present within the medium comprising the glucose as a carbon source or sole carbon source.

[0075] In some embodiments, a pharmaceutically acceptable dosage form can include an injectable dosage form, parenteral dosage form, topical dosage form, or a combination thereof. In some embodiments, the enteral dosage form can comprise an oral dosage form, intragastric dosage form, or rectal dosage form. In some embodiments, the intragastric dosage form can comprise a dosage form that is configured to pass through a feeding tube.

[0076] In some embodiments, the bacterial genus Lactobacillaceae can comprise strains Vertebrate-Associated Lactobacillaceae, LimosiVertebrate-Associated Lactobacillaceae, LigiVertebrate-Associated Lactobacillaceae, Lacticaseibacillus sp., Lactobacillus crispatus, Lactobacillus gasseri, Limosilactobacillus vaginalis, Limosilactobacillus fermentum, Lactobacillus plantarum, Lactobacillus jensenii, Lacticaseibacillus paracasei, or a combination thereof. In some embodiments, the bacterial genus the Bifidobacterium can comprise strains B. animalis, B. pseudocatenulatum, B. bifidum, B. breve, B. dentium, B. faecale, B. longum, or a combination thereof. In some embodiments, the first bacterial strain can comprise the Bifidobacterium sp. or the Lactobacillaceae sp. In some embodiments, the second bacterial strain can comprise the Bifidobacterium sp. or the Lactobacillaceae sp.

[0077] In some embodiments, the pharmaceutical composition can comprise a bacterial population comprising at least one strain of Bifidobacterium sp., at least one strain of Lactobacillus sp., at least one strain of Akkermansia sp., at least one strain of Anaerbutyricum sp., at least one strain of Anaerostipes sp., at least one strain of Anaerotignum sp., at least one strain of Bacillus sp., at least one strain of Bacteroides sp., at least one strain of Blautia sp., at least one strain of Clostridium sp., at least one strain of Coprococcus sp., Dorea sp., Enterococcus sp., at least one strain of Erysipelatoclostridium sp., at least one strain of Escherichia sp., at least one strain of Eubacterium sp., at least one strain of Faecalibacterium sp., at least one strain of Faecalicatena sp., at least one strain of Holdemanella sp., at least one strain of Lachnospira sp., at least one strain of Longibaculum sp., at least one strain of Paraprevotella sp., at least one strain of Parabacteroides sp., at least one strain of Pediococcus sp., at least one strain of Roseburia sp., at least one strain of Ruminococcus sp., or at least one strain of Veillonella sp., or a combination thereof.

[0078] In some embodiments, the energy source can comprise fructooligosaccharides (FOS), guar gum, corn syrup, polydextrose, Galacto-Oligosaccharides (GOS), lactose, inulin, mucin, sialic acid, glucan, fructose, N-Acetylglucosamine (GlcNAc), mannose, Lacto-N-neotetraose (LNnT), glucose, 2′-Fucosyllactose (2′-FL), galactose, fructose, pectin, starch, or a combination thereof. In some embodiments, the starch is not a fermented starch. In some embodiments, the starch can comprise a modified starch. In some embodiments, the modified starch can comprise a fermented starch. fermented starch can comprise a dextrin. In some embodiments, the dextrin can comprise a maltodextrin. In some embodiments, the pharmaceutical composition can comprise a pharmaceutically acceptable excipient, cryoprotectant, or combination thereof.

[0079] Disclosed herein, in some embodiments, are methods for treating a subject having or suspected of having a disease. In an aspect, a method for treating a subject having or suspected of having a disease comprises administering to the subject a pharmaceutical composition of any pharmaceutical compositions disclosed thereof.

[0080] In some embodiments, the disease is an inflammatory disease. In some embodiments, the inflammatory disease is a bacterial vaginosis (BV) or a necrotizing enterocolitis (NEC) disease. In some embodiments, the subject can have BV or NEC or be at risk of BV or NEC. In some embodiments, the subject can have a microbial dysbiosis in a gastrointestinal (GI) tract or vagina of the subject. In some embodiments, the subject at risk for BV can be at least about 10 years old, at least about 15 years old, at least about more than 15 years old, or at most about 120 years old. In some embodiments, the subject at risk for NEC can be a premature infant. In some embodiments, the subject at risk for NEC can be at most about 1 year old, or at least about 1 day old.

[0081] Disclosed herein, in some embodiments, are methods for producing a pharmaceutical composition. In an aspect, a method for producing a pharmaceutical composition comprises i. providing a plurality of bacterial strains, wherein the plurality of bacterial strains comprises Bifidobacterium sp. or Vertebrate-Associated Lactobacillaceae, ii. Culturing a given bacterial strain of the plurality of bacterial strains in a carbon source or a plurality of carbon sources, iii. Measuring growth of the plurality of bacterial strains, and iv. Selecting a bacterial strain of the plurality of bacterial strains wherein the bacterial strain, when present within a medium comprising the carbon source and a second bacterial strain or a supernatant of the medium comprising the carbon source and the second bacterial strain, exhibits a growth of at least about 105% by weight as compared to a growth of the first bacterial strain when present within a medium comprising the carbon source in an absence of the second bacterial strain or the supernatant of the medium comprising the carbon source and the second bacterial strain and wherein the carbon source may not comprise starch.

[0082] In some embodiments, the supernatant of the medium can be cell-free. In some embodiments, the supernatant of the medium can comprise a fermentation product derived from the second bacterial strain.

[0083] Disclosed herein, in some embodiments, are methods for producing a pharmaceutical composition. In an aspect, a method for producing a pharmaceutical composition comprises i. providing a plurality of bacterial strains, wherein the plurality of bacterial strains comprises Bifidobacterium sp. or Vertebrate-Associated Lactobacillaceae, ii. Culturing a given bacterial strain of the plurality of bacterial strains in a carbon source or a plurality of carbon sources, iii. Measuring growth of the plurality of bacterial strains, and iv. Selecting a bacterial strain of the plurality of bacterial strains wherein the plurality of bacterial strains comprises Bifidobacterium sp. or Vertebrate-Associated Lactobacillaceae, wherein the bacterial strain, when present within a medium comprising a secreted metabolite derived from a second bacterial strain, proliferates for at least about 10 cell divisions.

[0084] In some embodiments, the medium comprising the secreted metabolite derived from the bacterial strain can comprise a supernatant derived from a growth culture of the second bacterial strain. In some embodiments, the supernatant can be cell-free.

[0085] Disclosed herein, in some embodiments, are methods for producing a pharmaceutical composition. In an aspect, a method for producing a pharmaceutical composition comprises i. providing a plurality of bacterial strains, wherein the plurality of bacterial strains comprises Bifidobacterium sp. or Vertebrate-Associated Lactobacillaceae, ii. Culturing a given bacterial strain of the plurality of bacterial strains in a carbon source or a plurality of carbon sources, iii. Measuring growth of the plurality of bacterial strains, and iv. Selecting a bacterial strain of the plurality of bacterial strains wherein the plurality of bacterial strains comprises Bifidobacterium sp. or Vertebrate-Associated Lactobacillaceae, wherein i. the bacterial strain, when present within a medium comprising a secreted metabolite derived from the second bacterial strain and a layer of epithelial cells, can decrease permeability of the layer of epithelial cells by at least about 5%, as compared to permeability of a layer of epithelial cells present within a medium comprising the bacterial strain in an absence of the secreted metabolite, and ii. wherein the permeability of the layer of epithelial cells can be measured by transport of a Fluorescein isothiocyanate (FITC)-conjugated dextran or by transepithelial electrical resistance across the layer of epithelial cells.

[0086] In some embodiments, the medium comprising the secreted metabolite derived from the bacterial strain can comprise a supernatant derived from a growth culture of the second bacterial strain. In some embodiments, the supernatant can be cell-free. In some embodiments, the supernatant can comprise a fermentation product derived from the second bacterial strain. In some embodiments, the epithelial cells can comprise mammalian epithelial cells. In some embodiments, the mammalian epithelial cells can comprise human epithelial cells.

[0087] Disclosed herein, in some embodiments, are methods for producing a pharmaceutical composition. In an aspect, a method for producing a pharmaceutical composition comprises i. providing a plurality of bacterial strains, wherein the plurality of bacterial strains comprises Bifidobacterium sp. or Vertebrate-Associated Lactobacillaceae, ii. Culturing a given bacterial strain of the plurality of bacterial strains in a carbon source or a plurality of carbon sources, iii. Measuring growth of the plurality of bacterial strains, and iv. Selecting a bacterial strain of the plurality of bacterial strains wherein the plurality of bacterial strains comprises Bifidobacterium sp. or Vertebrate-Associated Lactobacillaceae, wherein a secreted metabolite or an inviable cell derived from the bacterial strain, when combined with an engineered cell comprising a reporter, decreases a signal of the reporter by at least about 5% as compared to a signal of the reporter when the engineered cell is not combined with the metabolite or the inviable cell derived from the bacterial strain.

[0088] In some embodiments, the medium comprising the secreted metabolite derived from the bacterial strain can comprise a supernatant derived from a growth culture of the second bacterial strain. In some embodiments, the supernatant can be cell-free. In some embodiments, the supernatant or the metabolite can comprise a fermentation product derived from the second bacterial strain. In some embodiments, the engineered cell comprises a macrophage. In some embodiments, the inviable cell comprises as pasteurized cell. In some embodiments, the reporter can comprise NFkB or ISRE. In some embodiments, the NFkB reporter can comprise a SEAP reporter. In some embodiments, the ISRE reporter can comprise a Lucia Luciferase.

[0089] Disclosed herein, in some embodiments, are methods for producing a pharmaceutical composition. In an aspect, a method for producing a pharmaceutical composition comprises i. providing a plurality of bacterial strains, wherein the plurality of bacterial strains comprises Bifidobacterium sp. or Vertebrate-Associated Lactobacillaceae, ii. Culturing a given bacterial strain of the plurality of bacterial strains in a carbon source or a plurality of carbon sources, iii. Measuring growth of the plurality of bacterial strains, and iv. Selecting a bacterial strain of the plurality of bacterial strains wherein the plurality of bacterial strains comprises Bifidobacterium sp. or Vertebrate-Associated Lactobacillaceae, wherein i. the bacterial strain, when present within a medium comprising the second bacterial strain or a supernatant thereof for at most about hours, exhibits a growth of at least about 105% by colony-forming unit (CFU) as compared to a growth of the bacterial strain when present within a medium not comprising the second bacterial strain or the supernatant thereof for at most about 15 hours.

[0090] In some embodiments, the medium comprising the second bacterial strain or the supernatant thereof can comprise a secreted metabolite derived from the second bacterial strain. In some embodiments, the metabolite can comprise a fermentation product derived from the second bacterial strain. In some embodiments, the supernatant can be cell-free.

[0091] Disclosed herein, in some embodiments, are methods for producing a pharmaceutical composition. In an aspect, a method for producing a pharmaceutical composition comprises i. providing a plurality of bacterial strains, wherein the plurality of bacterial strains comprises Bifidobacterium sp. or Vertebrate-Associated Lactobacillaceae, ii. Culturing a given bacterial strain of the plurality of bacterial strains in a carbon source or a plurality of carbon sources, iii. Measuring growth of the plurality of bacterial strains, and iv. Selecting a bacterial strain of the plurality of bacterial strains wherein the plurality of bacterial strains comprises Bifidobacterium sp. or Vertebrate-Associated Lactobacillaceae, wherein the first bacterial strain is i. configured to utilize a metabolite derived from the second bacterial strain as a growth promoter, and ii. wherein the metabolite is not a butyrate, a vitamin B12, or an ammonia (NH3).

[0092] In some embodiments, the metabolite can be a secreted metabolite derived from the second bacterial strain, and cannot be a derivative or a combination of the butyrate, the vitamin B12, or the ammonia (NH3).

[0093] Disclosed herein, in some embodiments, are methods for producing a pharmaceutical composition. In an aspect, a method for producing a pharmaceutical composition comprises i. providing a plurality of bacterial strains, wherein the plurality of bacterial strains comprises Bifidobacterium sp. or Vertebrate-Associated Lactobacillaceae, ii. Culturing a given bacterial strain of the plurality of bacterial strains in a carbon source or a plurality of carbon sources, iii. Measuring growth of the plurality of bacterial strains, and iv. Selecting a bacterial strain of the plurality of bacterial strains wherein the plurality of bacterial strains comprises Bifidobacterium sp. or Vertebrate-Associated Lactobacillaceae, wherein the bacterial strain is incapable of using sialic acid as a carbon source.

[0094] In some embodiments, the bacterial population, when present within the medium comprising the sialic acid, does not exhibit a growth of at least about 105% by weight as compared to the growth of a reference bacterial population when present within the medium comprising glucose as a carbon source or sole carbon source for the reference bacterial population.

[0095] Additional aspects and advantages of the present disclosure will become readily apparent to those skilled in this art from the following detailed description, wherein only illustrative embodiments of the present disclosure are shown and described. As will be realized, the present disclosure is capable of other and different embodiments, and its several details are capable of modifications in various obvious respects, all without departing from the disclosure. Accordingly, the drawings and description are to be regarded as illustrative in nature, and not as restrictive.

### BRIEF DESCRIPTION OF THE DRAWINGS

[0096] The features of the disclosure are set forth with particularity in the appended claims. A better understanding of the features and the disclosure will be obtained by reference to the following detailed description that sets forth illustrative embodiments, in which the principles of the disclosure are utilized, and the accompanying drawings (also “Figure” and “FIG.” herein), of which:

[0097] FIG. 1 shows that the growth curve of the L. crispatus and L. jensenii colonies, species in the Lactobacilli genus on MRS plates over the course of 32 hours (L. crispatus) and 20 hours (L. jensenii).

[0098] FIG. 2 shows a schematic of the Direct Carbohydrate Utilization Screen method for monitoring the growth of Bifidobacteria and Lactobacilli cultures in various carbohydrate-rich mediums. The data analysis method for visualizing the growth rates is also shown.

[0099] FIG. 3 shows the layout of the 96-well plate used for the Direct Carbohydrate Utilization Screen method.

[0100] FIG. 4 shows an example of the growth ratio to glucose for each bacterial strain of interest in each carbohydrate stock solution media as a clustermap.

[0101] FIG. 5 shows an example of a principal coordinates analysis visualizing the AUC ratio of each strain of interest cultured in each carbohydrate stock solution media.

[0102] FIG. 6 shows an example of the predicted Carbohydrate Utilization Screen AUC results for Lactobacillus strains.

[0103] FIG. 7 shows the method for executing Bifidobacteria screening, a technique to isolate and identify Bifidobacterial strains via DNA sequencing.

[0104] FIGS. 8A-8B show an example of the optical density measurement results for Bifidobacteria DNA. FIG. 8A shows an example of measurement data for the Qubit and Nanodrop, creating an identification profile for the Bifidobacterial strain. FIG. 8B shows an example of the assay results, creating a visual indication for identification of the Bifidobacterial strain.

[0105] FIGS. 9A-9G show examples of the nanopore sequencing measurement results for Bifidobacteria DNA, including the length of the DNA and the quality of the DNA. FIG. 9A shows an example of the nanodrop measurement data including examples of the average genome size for each strain of interest. FIG. 9B shows an example of the nanodrop measurement and analysis data including completeness and contamination measurements for various strains of interest. FIG. 9C shows an example of the average data for various strains of interest including completeness, contamination, and genome size averages. FIG. 9D shows an example of the nanodrop measurement and analysis data including the assembly error per million base pairs and the consensus quality score (QV). FIG. 9E shows an example of the gene number data plotted for each species of interest. FIG. 9F shows an example of the gene length data plotted for each species of interest. FIG. 9G shows an example of nanodrop data analyzed for various strains of interest, including polished average gene length ratios.

[0106] FIGS. 10A-10D show the method for membrane integrity screening using a monolayer of Caco-2 cells as an in vitro model for epithelial tissue. FIG. 10A shows the general method for membrane integrity screening. FIG. 10B shows an example of the microscopy visualization of the monolayer of Caco-2 cells in room air and a CO₂ incubator. FIG. 10C diagrams a 24-well plate setup in which groups consisting of 4 wells per group were subject to different treatments. FIG. 10D shows an example of the data involving measurement of TNFα induced membrane permeability over a number of hours.

[0107] FIGS. 11A-11B show examples of the results of the TEER membrane permeability analysis. FIG. 11A shows an example of TEER and FD4 fluorescence results for samples treated with various levels of IFNγ and/or IFNg treatment over the span of 4 hours for TEER and 48 hours for FD4 results. FIG. 11B shows examples of TEER and FD4 fluorescence results for individual plates over a period of 4 hours for TEER and 24 hours for FD4 results.

[0108] FIGS. 12A-12D show examples of the results of TEER membrane permeability analysis in room air incubation and alternatively CO₂ incubation, as well as with and without the addition of HCO₃. FIG. 12A shows examples of TEER results measured with the room air incubation condition with HCO₃ as well as without HCO₃ for a span of 4 hours post-treatment. FIG. 12B shows examples of TEER results measured with the room air incubation condition with HCO₃ as well as without HCO₃ for a span of 24 hours post-treatment. FIG. 12C shows examples of TEER results measured with the CO₂ incubation condition with HCO₃ as well as without HCO₃ for a span of 4 hours post-treatment. FIG. 12D shows examples of TEER results measured with the CO₂ incubation condition with HCO₃ as well as without HCO₃ for a span of 24 hours post-treatment.

[0109] FIGS. 13A-13F show the pathogen growth inhibition assay plate layout and examples of the spectrophotometry data results. FIG. 13A shows the layout of the 96-well plate for the in vitro growth inhibition assay. FIG. 13B shows an example of the cluster map data analysis for the OD₆₀₀ measurements of various pathogenic strains of interest and various bacterial strains of interest. FIG. 13C shows examples of the OD₆₀₀ curve of cultured pathogenic E. coli is in media with metabolites of the bacterial strains of interest, for example L. rhamnosus ST34, A. muciniphila ST7, and F. prausnitzii ST38 (Fp ST38). FIG. 13D shows examples of the OD₆₀₀ curve of cultured pathogenic E. coli in media with metabolites of the Bifidobacterium strains of interest, for example B. longum ST59, B. breve ST56, B. longum infantis ST19, B. stercoris ST24, B. dentium ST40, B. stercoris ST101, B. longum ST27, B. bifidum_1 ST50, and B. breve_2 ST30. FIG. 13E shows examples of the OD₆₀₀ curve for growth of cultured pathogenic K. pneumoniae in media with metabolites of the bacterial strains of interest, for example L. rhamnosus ST34. FIG. 13F shows examples of the OD₆₀₀ curve for growth of cultured pathogenic K. pneumoniae in media with metabolites of the Bifidobacterium strains of interest.

[0110] FIG. 14 shows the OD₆₀₀ curve for dose-dependent inhibition of E. coli growth.

[0111] FIGS. 15A-15J show the plate setup and examples of results of the SEAP detection assay in detecting inflammatory transcription factor NFκB in RAW-Dual cells after treatment with potential therapeutic strains. FIG. 15A shows an example of the 96-well plate setup for the SEAP assay. FIG. 15B shows examples of SEAP test results at various MOIs. FIG. 15C shows examples of SEAP test results for various metabolite factors of the bacterial strains of interest, for example A. muciniphila ST7 and B. bifidum ST80. FIG. 15D shows examples of NFκB SEAP activity results from the metabolites of various Bifidobacterium strains of interest. FIG. 15E shows examples of basal NFκB SEAP activity results, as well as examples of results from the metabolites of various other species of interest, for example Blautia and Roseburia. FIG. 15F shows examples of NFκB SEAP activity results for various metabolite factors of the bacterial strains of interest on E. coli cell growth. FIG. 15G shows examples of NFκB SEAP activity results at various supernatant dilution factors for various pathogens of interest including E. coli. FIG. 15H shows examples of NFκB SEAP activity results at various supernatant dilution factors deriving from various bacterial strains of interest including B. bifidum ST80. FIG. 15I shows examples of NFκB SEAP activity results at various supernatant dilution factors deriving from various bacterial strains of interest including B. longum EV27. FIG. 15J shows examples of NFκB SEAP activity results at various supernatant dilution factors deriving from various bacterial strains of interest including Fp ST38.

[0112] FIGS. 16A-16H show examples of the results of LUC testing in detecting inflammatory transcription factor IRF in RAW-Dual cells after treatment with potential therapeutic strains. FIG. 16A shows examples of LUC test result data for IRF LUC activity at various concentrations of lipopolysaccharides (LPS). FIG. 16B shows examples of LUC test result data for various MOIs. FIG. 16C shows examples of the results of LUC testing for metabolite factors of the bacterial strains of interest, for example A. muciniphila ST7 and B. bifidum ST80 at various dilutions. FIG. 16D shows examples of the results of LUC testing for IRF LUC activity at various dilution factors for the metabolites of various strains of interest, including B. longum EV27. FIG. 16E shows examples of the results of LUC testing for IRF LUC activity at various dilution factors for the metabolites of various strains of interest, including B. theta ST8. FIG. 16F shows examples of the results of LUC testing for IRF LUC activity at various dilution factors for the metabolites of various strains of interest, including Fp ST38. FIG. 16G shows examples of the results of LUC testing for IRF LUC activity for various metabolites of the strains of interest when interacting with pathogens of interest, for example E. coli. FIG. 16H shows examples of the results of LUC testing for IRF LUC activity for the metabolites of various strains of interest at various LPS concentrations.

[0113] FIG. 17 depicts a cartoon schematic of an exemplary strain selection method as described herein.

[0114] FIG. 18 depicts an exemplary clustermap of vaginally relevant carbohydrate utilization screening results of the exemplary bacterial strains described herein, depicting the growth ratio between the carbohydrate (listed on y-axis) and glucose.

[0115] FIG. 19 depicts an exemplary clustermap of BV pathogen biofilm inhibition results represented by the Biofilm Remaining Ratio.

[0116] FIG. 20 depicts a cartoon schematic of an exemplary method for identify a therapeutic consortium.

[0117] FIG. 21 depicts an exemplary clustermap of NEC pathogen growth inhibition results represented by the Pathogen Growth Ratio (area under the growth curve of treated culture/area under the curve of a media control).

### DETAILED DESCRIPTION

### Microbial Dysbiosis and Diseases

[0118] Microbial dysbiosis, the imbalance of microbiome/microbiota (the group or community of microbes or microorganism residing within a subject), can cause or be associated in various diseases and disease/pathological conditions. In some cases, while the microbial dysbiosis may not cause the diseases or disease conditions, it can affect the development and/or progression of the symptoms of the diseases and disease/pathological conditions. In some cases, restoring the microbial dysbiosis can treat/prevent the diseases or disease conditions and improve/alleviate the development/progression of the symptoms of the diseases or disease conditions. One way to restore the microbial dysbiosis can comprise administration of microbes to a subject or patient.

[0119] A microbial dysbiosis-associated disease can comprise diseases that affect genital organ, such as vaginal diseases. Bacterial vaginosis (BV) is a vaginal disease that affects about 21 million females annually in the U.S. BV can increase the risk of acquiring sexually transmitted infections (STI), genital tract infections, miscarriage, pelvic inflammatory disease (PID), vulvovaginitis, lower success in fertility, preterm labor, preterm delivery, morbidity, and/or postpartum. Among the patients that have been treated with current standard of care (SOC), such as the uses of antibiotics, about 30% of them can experience recurrence of BV (as short as within 3-months). Treatments for recurrent BV are currently not available. Symptomatic BV can result in itching, unpleasant odor, and discharges.

[0120] BV can occur during the dysbiosis of the vaginal microbiota (microbiome). Bacterial diversity can be the primary clinical score for diagnosis of BV. The healthy vaginal microbiota is a community containing a small number of dominant lactic acid-producing Lactobacillus species. BV is characterized by a loss of beneficial Lactobacillus species, increases in pathobionts/pathogens (microbes not normally present in a healthy subject or microbes that present in an amount exceeding those in the normal healthy subject or the subject without the disease), microbial diversity, and/or an increase in vaginal pH. As used herein, a pathogen comprises a microorganism that: (1) causes a disease or disease condition; (2) associated with a disease or disease condition; and/or (3) contributes to the symptoms of the disease or disease condition. In some instances, inhibiting or eliminating a pathogen can treat or prevent the disease or disease condition or alleviate the symptoms of the disease or disease condition. In some cases, a pathogen can be an opportunistic pathogen that is not virulent in healthy subjects but can become virulent with immunocompromised and unhealthy subjects). In some cases, a pathogen can be a pathobiont.

[0121] In some cases, dominant Lactobacillus species within a healthy subject can protect the healthy vagina by preventing colonization/engraftment by pathogens and decrease inflammation through resource (such as nutrients) utilization, metabolic shifts, direct microbe-host interactions with the epithelial barrier, and/or vaginal tract acidification. For examples, the dominant Lactobacillus species of a healthy vagina can inhibit the engraftment of the pathogens at least by competitive exclusion of the pathogens; releasing bacterial products such as lactic acid or reactive oxidative species; and/or proteinaceous or peptidic antimicrobial products. During the progression of BV, the dominant Lactobacillus species in the healthy vagina can first be depleted, resulting in an increase of vaginal pH and/or loss of lactic acids and ROS (and other bacterial products produced by the dominant Lactobacillus species). The vagina can then be colonized by pathogens such as G. vaginalis and/or P. bivia, resulting in the muscle degradation, releases of the ammonia (via the conversion from the amino acid generated by the degraded muscles), increased growth and biofilm formation of G. vaginalis, P. bivia, and others, disruption of vaginal epithelial barrier, and/or releases of sialidase. Subsequently, the immune system of the subject can release pro-inflammatory cytokines/chemokines, causing inflammation and further complicating the muscle degradation, the release of the ammonia, the growth and biofilm formation of various vaginal pathogens, disruption of vaginal epithelial barrier, and/or releases of sialidase, resulting in BV. As used herein, a vaginal pathogen comprises a microorganism that: (1) causes a vaginal disease or disease condition; (2) associated with a vaginal disease or disease condition; and/or (3) contributes to the symptoms of the vaginal disease or disease condition. In some instances, inhibiting or eliminating a vaginal pathogen can treat or prevent the vaginal disease or disease condition or alleviate the symptoms of the vaginal disease or disease condition.

[0122] Another microbial dysbiosis-associated disease can comprise gastrointestinal diseases that affect gastrointestinal tract, such as infant gastrointestinal diseases or disease conditions. Necrotizing enterocolitis (NEC) is an infant gastrointestinal disease or disease condition that affects about 100,000 infants annually in the U.S. NEC is one of the leading causes of illness and death among preterm infants. About 5-12% of preterm infants (i.e., born before the 37 weeks of pregnancy) can develop NEC. About 40-50% of infants with NEC die from the disease.

[0123] NEC can result from intestinal inflammation in preterm infants. NEC is a gastrointestinal disease or disease condition characterized by inflammation, ischemia, and tissue necrosis. Infants with NEC display impaired epithelial barrier integrity with decreased mucus; decreased intracellular junction integrity (such as tight junction); increased intestinal permeability; reduced peristaltic movement; and impaired epithelial cell regeneration; decreased immunoglobulin A, and/or altered microbiota, leading to inflamed intestine (inflamed wall with gas bubbles). In infants with NEC, opportunistic pathogens can displace healthy microbiota and dominate the gut of preterm infants. Additionally, preterm birth can negatively impact gut microbiota development. Multiple opportunistic pathogens in the hospital setting can colonize the preterm infant gut, including E. coli, K. pneumoniae, E. clocae, Salmonella, and E. faecalis. Colonization by these bacteria can contribute to inflammation, infection, antibiotic resistance, and sepsis in preterm infants with no protective gut microbiota. These preterm infant colonizing pathogens can also contain antimicrobial resistance genes, rendering treatments with antibiotics ineffective. Additionally, NEC can be characterized by a breakdown of epithelial barrier integrity in the gastrointestinal tract.

[0124] NEC can be driven by a pathogenic microbiome. Opportunistic bacterial pathogens can colonize the intestinal tract in preterm infants. In these infants, beneficial bacteria found in the full-term infant gut are absent. Pathogens can drive the activation of immune response (such as innate immune responses including those regulated by TLR4), resulting in secretion of inflammatory cytokines and drives Th17 polarization. Uncontrolled intestinal inflammation can increase intestinal epithelial permeability, leading to a cycle of inflammation, infection, and necrosis.

[0125] Currently available therapeutics can lack efficiency, efficacy, and/or applicability to wide population of patients. Currently available therapeutics can be ineffective for not sufficient to inhibit growth or biofilm by the pathogen, thereby unable to prevent engraftment of the pathogens. Currently available therapeutics can be inefficient for not facilitating the engraftment of the vagina/infant gastrointestinal tract by healthy microbiota (which can prevent the development or progression of BV, as described herein). For example, currently available therapeutics (such as when comprising a microbe for facilitating the engraftment of the microbe to the vagina or gastrointestinal (GI) tract) may not sufficiently adhere to the vaginal or intestinal epithelial cells. Currently available therapeutics may not sufficiently increase barrier integrity. Additionally, these currently available therapeutics may not sufficiently utilize vaginal or infant gastrointestinally relevant carbohydrates (for example, as a nutrient source), rendering them insufficient to proliferate within these organs/tissues and unable to reduce the engraftment by the pathogen microbes. A nutrient source, as used herein, refers to a substance that is metabolized by a microbe or microorganism. In addition, current available therapeutics may not be sufficient to reduce inflammation that contributes to the diseases as described herein, thereby unable to reduce or improve the symptoms associated with the diseases. While antibiotics can be effective in inhibiting or eliminating pathogens in some cases of BV/NEC, it also inhibits and eliminates healthy microbiota, which in turn can prevent the engraftment of the vagina/infant gastrointestinal tract by healthy microbiota and increase the risk of the tissue being engrafted by pathogens or losing the healthy microbiota. In some cases, the uses of antibiotics can also increase the risk of recurrent BV, since antibiotics can also inhibit the growth of all microbes, including those within the normal microbiota of a normal subject. In other cases, the uses of antibiotics lack effectiveness, due to the antimicrobial resistance acquired by some of the pathogens (such as in NEC). The heterogeneity (such as genetic, epigenetic, environmental, and/microbiome differences) can present difficulty to design therapeutics that can treat or prevent BV (such as recurrent BV) or NEC. Currently available therapeutics are also incapable of preventing the disease, for the same reasons as described herein.

[0126] Provided herein, are compositions for treating diseases or disease conditions associated with microbial dysbiosis and methods of using the compositions for treating the diseases or disease conditions. The compositions can comprise a bacteria or a plurality of bacteria. Also provided herein are methods for identify the bacteria or the plurality of bacteria.

[0127] The compositions provided herein have higher effectiveness, efficiencies, and applicability to subjects' population, relative to the currently available therapeutics. In some cases, the compositions provided herein can be sufficient to inhibit growth or biofilm by the pathogen, thereby preventing the engraftment of the pathogens. In some cases, the compositions provided herein can be efficient in facilitating the engraftment of the vagina/infant gastrointestinal tract by healthy microbiota (which can prevent the development or progression of BV, as described herein). In some cases, the compositions provided herein can sufficiently increase barrier integrity that is comprised in the subjects with the disease. For example, the compositions provided herein can sufficiently adhere to the vaginal or intestinal epithelial cells. In some cases, the compositions provided herein can sufficiently utilize vaginal or infant gastrointestinally relevant carbohydrates (for example, as a nutrient source), rendering them sufficient to proliferate within these organs and reduce the engraftment by the pathogen microbes. In some cases, the compositions provided herein can be sufficient to reduce inflammation that contributes to the diseases as described herein, thereby reducing or improving the symptoms associated with the diseases. In some cases, the compositions provided herein may not inhibit the growth of microbiota associated with the healthy vagina or infant gastrointestinal tract, thereby reducing the risk of the subject being suffered from the same disease (such as recurrent BV). In some cases, the compositions provided herein can be based on selection of bacteria (as described herein) that can be sufficient to reduce or prevent the disease described herein in a wide population with heterogenicity. For the same reasons as described herein, the compositions provided herein can be used to prevent the development of the diseases.

### Compositions

[0128] Provided herein, are compositions and/or formulations. The compositions and/or formulations can be used for treating disease or disease conditions associated with microbial dysbiosis, such as those described herein. The compositions and/or formulations can comprise a bacterial population. The compositions and/or formulations can further comprise a pharmaceutically-acceptable excipient, nutrients for the bacterial population, and other components for administrating to a subject. The compositions and/or formulations described herein can thus also comprise pharmaceutical compositions and/or formulations.

### Bacterial Populations

[0129] The bacterial population provided herein can comprise a bacterial strain or a plurality bacterial strains. The term “strain” or “bacterial strain” as used herein refers to a group of bacterial cells, isolates, progenies thereof, or derivatives thereof comprising at least 50%, at least 60%, at least 70%, at least 80%, at least 90%, at least 91%, at least 92%, at least 93%, at least 94%, at least 95%, at least 96%, at least 97%, at least 98%, at least 99% or more sequence identity in the genome sequences. For example, two bacterial cells, isolates, progenies thereof, derivatives thereof, or any combinations thereof may be the same strain if they share at least 50%, at least 60%, at least 70%, at least 80%, at least 90%, at least 91%, at least 92%, at least 93%, at least 94%, at least 95%, at least 96%, at least 97%, at least 98%, at least 99% or more sequence identity in the genome sequences. In some cases, a strain as used herein can also refer to a group of bacterial cells, isolates, progenies thereof, or derivatives thereof comprising at least 50%, at least 60%, at least 70%, at least 80%, at least 90%, at least 91%, at least 92%, at least 93%, at least 94%, at least 95%, at least 96%, at least 97%, at least 98%, at least 99% or more sequence identity in the 16S rRNA gene sequences. For example, two bacterial cells, isolates, progenies thereof, derivatives thereof, or any combinations thereof may be the same strain if they share at least 50%, at least 60%, at least 70%, at least 80%, at least 90%, at least 91%, at least 92%, at least 93%, at least 94%, at least 95%, at least 96%, at least 97%, at least 98%, at least 99% or more sequence identity in their 16S rRNA or rDNA sequences. The bacterial population can be used for treating a disease or disease condition as described herein. A bacteria or bacterial strain of the bacterial population can comprise a sufficient ability in a disease or disease condition associated function as described herein (i.e., the bacteria or bacterial strain is sufficiently capable of carrying out a particular disease or disease condition associated function). For example, the disease or disease condition associated function may comprise any of those described in EXAMPLEs 2-3, 5, 7-8, and 10-11. In some cases, the bacterial population may comprise a plurality of bacterial strains or at least two bacterial strains. In some case, the plurality of bacterial strains or at least two bacterial strains of the bacterial population can have a collective effect in the disease or disease condition associated function as described herein. In some cases, the plurality of bacterial strains or at least two bacterial strains of the bacterial population may comprise at least one donor bacterial strain and at least one recipient bacterial strain.

### Microbial Taxonomy

[0130] The bacterial strain described herein can comprise a bacterial strain of Firmicutes or Actinomycetota. The bacterial strain described herein can comprise a bacterial strain of Firmicutes. The bacterial strain described herein can comprise a bacterial strain of Actinomycetota. The bacterial strain described herein can comprise a bacterial strain of Bacilli or Actinomycetia. The bacterial strain described herein can comprise a bacterial strain of Bacilli. The bacterial strain described herein can comprise a bacterial strain of Actinomycetia. The bacterial strain described herein can comprise a bacterial strain of Lactobacillales or Bifidobacteriales. The bacterial strain described herein can comprise a bacterial strain of Lactobacillales. The bacterial strain described herein can comprise a bacterial strain of Bifidobacteriales. The bacterial strain described herein can comprise a bacterial strain of Lactobacillaceae or Bifidobacteriaceae. The bacterial strain described herein can comprise a bacterial strain of Lactobacillaceae. The bacterial strain described herein can comprise a bacterial strain of Bifidobacteriaceae. The bacterial strain described herein can comprise a bacterial strain of Lactobacillus sp. (or Vertebrate-Associated Lactobacillaceae) or Bifidobacterium sp. The bacterial strain described herein can comprise a bacterial strain of Lactobacillus sp. (or Vertebrate-Associated Lactobacillaceae). The bacterial strain described herein can comprise a bacterial strain of Bifidobacterium sp. In some cases, a bacterial strain described herein can be isolated from a vertebrate (or the bacterial strain is vertebrate-associated). In some cases, a bacterial strain described herein can be isolated from a human subject. In some cases, a bacterial strain described herein can be isolated from a healthy human subject. The healthy human subject can be a female. The healthy human subject can be a male. The healthy human subject can be an infant. For example, the bacterial strain can be vertebrate-associated Bifidobacterium sp. The healthy human subject may not have a disease or disease condition as described herein.

[0131] In some instances, a species of Lactobacillus family may comprise a species of the Lactobacillus genus proposed in 1901, which is described in Zheng, J., et. al. Int. J. Syst. Evol. Microbiol. 2020; 70:2782-2858 and is entirely incorporated herein by reference. The Lactobacillus genus may comprise Gram-positive, fermentative, facultatively anaerobic, and/or non-spore forming microorganisms. In some cases, the number of microorganisms that can be classified as Lactobacillus genus may increase, compared to those classified in 1901, with the broad definition of the 1901 classification. Lactobacillus genus may comprise about 261 species that comprise distinctive phenotypic, ecological, and/or genotypic characteristics. The number of species in the genus and/or the level of diversity within the Lactobacillus genus may exceed those of other bacterial genera and/or bacterial families. In this case, Lactobacillus can be reclassified. For example, the average nucleotide identity (ANI), average amino acid identity (AAI), core-gene average amino acid identity (cAAI), core genome phylogeny, signature genes, and metabolic, and/or ecological criteria of the bacterial species in the Lactobacillus genus and its sister taxa in the Lactobacillaceae and Leuconostocacae families are used to reclassify the Lactobacillus genus classified using the definition of 1901 (1901 classification).

[0132] In some cases, under the reclassification system, the species of the Lactobacillaceae family may comprise about 26 different genera (Lactobacillus, Paralactobacillus, Pediococcus, Holzapfelia, Amylolactobacillus, Bombilactobacillus, Companilactobacillus, Lapidilactobacillus, Agrilactobacillus, Schleiferilactobacillus, Loigolactobacillus, Lacticaseibacillus, Latilactobacillus, Dellaglioa, Liquorilactobacillus, Ligilactobacillus, Lactiplantibacillus, Furfurilactobacillus, Paucilactobacillus, Limosilactobacillus, Fructilactobacillus, Acetilactobacillus, Apilactobacillus, Levilactobacillus, Secundilactobacillus, and Lentilactobacillus), as well as merging the Leuconostocacae family into the Lactobacillaceae family. A comparison of the reclassified Lactobacillus species can be found using the Lactotax database, which can be found in the link: http://Lactobacillus.ualberta.ca/ and is entirely incorporated herein by reference. The classification of Lactobacillus described herein, is also provided in Parks, D H et. al. Nat Biotechnol. 2018 November; 36(10):996-1004; Salvetti, E, et. al. Appl Environ Microbio. 2018 Aug. 17; 84(17). Print 2018 Sep. 1 Erratum in: Appl Environ Microbio. 2018 Oct. 1; 84(20); Markets and Markets: https://www.marketsandmarkets.com/Market-Reports/probiotic-market-advanced-technologies-and-global-market-69.html); Parker, C T, et. al. Int. J. Syst. Evol. Microbiol. 68:1825-1829; Duar, D M, et. al. FEMS Microbiol Rev. 2017 Aug. 1; 41 (Supp_1): S27-S48; or Pane and Vinot 2019: https://www.microbiometimes.com/the-Lactobacillus-taxonomy-change-is-coming-why-and-how-to-make-the-most-of-it/, each of which is entirely incorporated herein by reference.

[0133] TABLE 1 below shows the names of various Lactobacillus sp. under the 1901 classification and the reclassification.

TABLE 1
Lactobacillus sp. names before and after reclassification

| Name of Lactobacillus species | Name of Lactobacillus species |
|---|---|
| classified in 1901 | under reclassification |
| Lactobacillus acidipiscis | Ligilactobacillus acidipiscis |
| Lactobacillus acidophilus | Lactobacillus acidophilus |
| Lactobacillus agilis | Ligilactobacillus agilis |
| Lactobacillus aviarius | Ligilactobacillus aviarius |
| Lactobacillus brevis | Levilactobacillus brevis |
| Lactobacillus coleohominis | Limosilactobacillus coleohominis |
| Lactobacillus crispatus | Lactobacillus crispatus |
| Lactobacillus crustorum | Companilactobacillus crustorum |
| Lactobacillus curvatus | Latilactobacillus curvatus |
| Lactobacillus diolivorans | Lentilactobacillus diolivorans |
| Lactobacillus farraginis | Lentilactobacillus farraginis |
| Lactobacillus fermentum | Limosilactobacillus fermentum |
| Lactobacillus fuchuensis | Latilactobacillus fuchuensis |
| Lactobacillus harbinensis | Schleiferilactobacillus harbinensis |
| Lactobacillus helveticus | Lactobacillus helveticus |
| Lactobacillus hilgardii | Lentilactobacillus hilgardii |
| Lactobacillus intestinalis | Lactobacillus intestinalis |
| Lactobacillus jensenii | Lactobacillus jensenii |
| Lactobacillus johnsonii | Lactobacillus johnsonii |
| Lactobacillus kefiranofaciens | Lactobacillus kefiranofaciens |
| Lactobacillus kefiri | Lentilactobacillus kefiri |
| Lactobacillus lindneri | Fructilactobacillus lindneri |
| Lactobacillus mali | Liquorilactobacillus mali |
| Lactobacillus manihotivorans | Lacticaseibacillus manihotivorans |
| Lactobacillus mucosae | Limosilactobacillus mucosae |
| Lactobacillus oeni | Liquorilactobacillus oeni |
| Lactobacillus oligofermentans | Paucilactobacillus oligofermentans |
| Lactobacillus panis | Limosilactobacillus panis |
| Lactobacillus pantheris | Lacticaseibacillus pantheris |
| Lactobacillus parabrevis | Levilactobacillus parabrevis |
| Lactobacillus paracollinoides | Secundilactobacillus paracollinoides |
| Lactobacillus parakefiri | Lentilactobacillus parakefiri |
| Lactobacillus paraplantarum | Lactiplantibacillus paraplantarum |
| Lactobacillus pentosus | Lactiplantibacillus pentosus |
| Lactobacillus pontis | Limosilactobacillus pontis |
| Lactobacillus reuteri | Limosilactobacillus reuteri |
| Lactobacillus rhamnosus | Lacticaseibacillus rhamnosus |
| Lactobacillus rossiae | Furfurilactobacillus rossiae |
| Lactobacillus salivarius | Ligilactobacillus salivarius |
| Lactobacillus siliginis | Furfurilactobacillus siliginis |
| Lactobacillus sucicola | Liquorilactobacillus sucicola |
| Lactobacillus vaccinostercus | Paucilactobacillus vaccinostercus |
| Lactobacillus vaginalis | Limosilactobacillus vaginalis |
| Lactobacillus vini | Liquorilactobacillus vini |
| Lactobacillus zeae | Lacticaseibacillus zeae |

[0134] The naming used in this application can be determined using the 1901 classification or the reclassification as described herein, interchangeably. As used herein, Vertebrate-Associated Lactobacillaceae refers to bacterial genera in the Lactobacillaceae family that are associated with vertebrates, which includes Lactobacillus, Limosilactobacillus, Ligilactobacillus, and Lacticaseibacillus. In some instances, the bacterial population may comprise at least one strain of Vertebrate-Associated Lactobacillaceae, or at least one strain of Bifidobacterium sp. In some instances, a bacterial population may comprise at least one strain of Bifidobacterium sp. In some instances, a bacterial population may comprise at least one strain of Vertebrate-Associated Lactobacillaceae.

[0135] The bacterial strain described herein can comprise a bacterial strain of Bifidobacterium adolescentis, Bifidobacterium bifidum, Bifidobacterium breve, Bifidobacterium longum, Bifidobacterium pseudocatenulatum, Lactobacillus crispatus, Lactobacillus gasseri, Lactobacillus jensenii, Lactobacillus plantarum, or Lactobacillus rhamnosus. The bacterial strain described herein for treating or preventing a vaginal disease or a complication associated with a vaginal disease can comprise a bacterial strain of Lactobacillus crispatus, Lactobacillus gasseri, Lactobacillus jensenii. The bacterial strain described herein for treating or preventing a vaginal disease or a complication associated with a vaginal disease can comprise a bacterial strain of Lactobacillus crispatus. The bacterial strain described herein for treating or preventing a vaginal disease or a complication associated with a vaginal disease can comprise a bacterial strain of Lactobacillus gasseri. The bacterial strain described herein for treating or preventing a vaginal disease or a complication associated with a vaginal disease can comprise a bacterial strain of Lactobacillus jensenii. The bacterial strain described herein for treating or preventing infant gastrointestinal disease can comprise Bifidobacterium adolescentis, Bifidobacterium bifidum, Bifidobacterium breve, Bifidobacterium longum, Bifidobacterium pseudocatenulatum, Lactobacillus plantarum, or Lactobacillus rhamnosus. The bacterial strain described herein for treating or preventing infant gastrointestinal disease can comprise Bifidobacterium adolescentis. The bacterial strain described herein for treating or preventing infant gastrointestinal disease can comprise Bifidobacterium bifidum. The bacterial strain described herein for treating or preventing infant gastrointestinal disease can comprise Bifidobacterium breve. The bacterial strain described herein for treating or preventing infant gastrointestinal disease can comprise Bifidobacterium longum. The bacterial strain described herein for treating or preventing infant gastrointestinal disease can comprise Bifidobacterium pseudocatenulatum. The bacterial strain described herein for treating or preventing infant gastrointestinal disease can comprise Lactobacillus plantarum. The bacterial strain described herein for treating or preventing infant gastrointestinal disease can comprise Lactobacillus rhamnosus.

[0136] The bacterial strain described herein may comprise Lactobacillus crispatus ST100 (or “ST100”), Bifidobacterium bifidum ST31 (or “ST31”), Bifidobacterium bifidum ST80 (or “ST80”), Lactobacillus crispatus ST20 (or “ST20”), Lactobacillus crispatus ST112 (or “ST112”), Lactobacillus gasseri ST105 (or “ST105”), Lactobacillus jensenii ST21 (or “ST21”), Lactobacillus plantarum ST65 (or “ST65”), Bifidobacterium adolescentis ST101 (or “ST101”), Bifidobacterium breve ST56 (or “ST56”), Bifidobacterium longum ST19 (or “ST19”), Bifidobacterium longum ST81 (or “ST81”), Bifidobacterium pseudocatenulatum ST37 (or “ST37”), Bifidobacterium pseudocatenulatum ST66 (or “ST66”), Lactobacillus rhamnosus ST116 (or “ST116”), Bifidobacterium breve ST71 (or “ST71”), Bifidobacterium longum ST23 (or “ST23”), Bifidobacterium longum ST119 (or “ST119”). The bacterial strain described herein may comprises ST100. The bacterial strain described herein may comprises ST31. The bacterial strain described herein may comprises ST80. The bacterial strain described herein may comprises ST20. The bacterial strain described herein may comprises ST112. The bacterial strain described herein may comprises ST105. The bacterial strain described herein may comprises ST21. The bacterial strain described herein may comprises ST65. The bacterial strain described herein may comprises ST101. The bacterial strain described herein may comprises ST56. The bacterial strain described herein may comprises ST19. The bacterial strain described herein may comprises ST81. The bacterial strain described herein may comprises ST37. The bacterial strain described herein may comprises ST66. The bacterial strain described herein may comprises ST116. The bacterial strain described herein may comprises ST71. The bacterial strain described herein may comprises ST23. The bacterial strain described herein may comprises ST119.

[0137] The bacterial strain of Lactobacillus crispatus described herein may comprise ST100, ST112, or ST20. The bacterial strain of Lactobacillus crispatus described herein may comprise ST100. The bacterial strain of Lactobacillus crispatus described herein may comprise ST20. The bacterial strain of Lactobacillus crispatus described herein may comprise ST112. The bacterial strain of Lactobacillus gasseri described herein may comprise ST105. The bacterial strain of Lactobacillus jensenii described herein may comprise ST21. The bacterial strain of Lactobacillus plantarum described herein may comprise ST65. The bacterial strain of Lactobacillus rhamnosus described herein may comprise ST116. The bacterial strain of Bifidobacterium adolescentis described herein may comprise ST101. The bacterial strain of Bifidobacterium bifidum described herein may comprise ST31 or ST80. The bacterial strain of Bifidobacterium bifidum described herein may comprise ST31. The bacterial strain of Bifidobacterium bifidum described herein may comprise ST80. The bacterial strain of Bifidobacterium breve described herein may comprise ST56 or ST71. The bacterial strain of Bifidobacterium breve described herein may comprise ST56. The bacterial strain of Bifidobacterium breve described herein may comprise ST71. The bacterial strain of Bifidobacterium pseudocatenulatum described herein may comprise ST37 or ST66. The bacterial strain of Bifidobacterium pseudocatenulatum described herein may comprise ST37. The bacterial strain of Bifidobacterium pseudocatenulatum described herein may comprise ST66. The bacterial strain of Bifidobacterium longum described herein may comprise ST19, ST81, ST23, or ST119. The bacterial strain of Bifidobacterium longum described herein may comprise ST19. The bacterial strain of Bifidobacterium longum described herein may comprise ST81. The bacterial strain of Bifidobacterium longum described herein may comprise ST23. The bacterial strain of Bifidobacterium longum described herein may comprise ST119.

[0138] In some instances, a bacterial population may comprise one or more Bifidobacterium sp. The one or more Bifidobacterium sp. may include Bifidobacterium adolescentis, Bifidobacterium aerophilum, Bifidobacterium angulatum, Bifidobacterium animalis, Bifidobacterium asteroids, Bifidobacterium bifidum, Bifidobacterium boum, Bifidobacterium breve, Bifidobacterium catenulatum, Bifidobacterium choerinum, Bifidobacterium coryneforme, Bifidobacterium cuniculi, Bifidobacterium dentium, Bifidobacterium faecale, Bifidobacterium gallicum, Bifidobacterium globosum, Bifidobacterium indicum, Bifidobacterium infantis, Bifidobacterium longum, Bifidobacterium magnum, Bifidobacterium minimum, Bifidobacterium pseudocatenulatum, Bifidobacterium seudolongum, Bifidobacterium pullorum, Bifidobacterium stercoris. Bifidobacterium subtile, Bifidobacterium suis, or Bifidobacterium thermophilum, or a combination thereof. In some instances, a bacterial population may comprise one or more Lactobacillus sp. The one or more Lactobacillus sp. may include Lactobacillus johnsonii, Lactocaseibacillus rhamnosus, Lactocaseibacillus zeae, Ligilactobacillus acidipiscis, Lactobacillus acidophilus, Ligilactobacillus agilis, Ligilactobacillus aviarius, Levilactobacillus brevis, Limosilactobacillus coleohominis, Lactobacillus crispatus, Companilactobacillus crustorum, Latilactobacillus curvatus, Lentilactobacillus diolivorans, Lentilactobacillus farraginis, Limosilactobacillus fermentum, Latilactobacillus fuchuensis, Schleiferilactobacillus harbinensis, Lactobacillus helveticus, Lentilactobacillus hilgardii, Lactobacillus intestinalis, Lactobacillus jensenii, Lactobacillus kefiranofaciens, Lentilactobacillus kefiri, Fructilactobacillus lindneri, Liquorilactobacillus mali, Lactocaseibacillus manihotivorans, Limosilactobacillus mucosae, Liquorilactobacillus oeni, Paucilactobacillus oligofermentans, Limosilactobacillus panis, Lactocaseibacillus pantheris, Levilactobacillus parabrevis, Secundilactobacillus paracollinoides, Lentilactobacillus parakefiri, Lactoplantibacillus paraplantarum, Lactoplantibacillus pentosus, Limosiactobacillus pontis, Limosilactobacillus reuteri, Furfurilactobacillus rossiae, Ligilactobacillus salivarius, Furfurilactobacillus siliginis, Liquorilactobacillus sucicola, Paucilactobacillus vaccinostercus, Limosilactobacillus vaginalis, Liquorilactobacillus vini, Laclococcus garvieae, or Lactococcus lactis, or a combination thereof.

[0139] In some cases, the bacterial population may comprise at least one strain of Akkermansia sp., at least one strain of Blautia sp., at least one strain of Clostridium sp., at least one strain of Coprococcus sp., at least one strain of Dorea sp., at least one strain of Faecalibacterium sp., at least one strain of Roseburia sp., at least one strain of Ruminococcus sp., at least one strain of Anaerbutyricum sp., at least one strain of Anaerostipes sp., at least one strain of Anaerotignum sp., at least one strain of Bacillus sp., at least one strain of Bacteroides sp., at least one strain of Clostridium sp., at least one strain of Collinsella sp., at least one strain of Enterococcus sp., at least one strain of Erysipelatoclostridium sp., at least one strain of Escherichia sp., at least one strain of Eubacterium sp., at least one strain of Faecalicatena sp., at least one strain of Holdemanella sp., at least one strain of Lachnospira sp., at least one strain of Longibaculum sp., at least one strain of Paraprevotella sp., at least one strain of Parabacteroides sp., at least one strain of Pediococcus sp., or at least one strain of Veillonella sp. In some instances, a bacterial population may comprise at least one strain of Akkermansia sp. In some instances, a bacterial population may comprise at least one strain of Blautia sp. In some instances, a bacterial population may comprise at least one strain of Clostridium sp. In some instances, a bacterial population may comprise at least one strain of Coprococcus sp. In some instances, a bacterial population may comprise at least one strain of Dorea sp. In some instances, a bacterial population may comprise at least one strain of Faecalibacterium sp. In some instances, a bacterial population may comprise at least one strain of Roseburia sp. In some instances, a bacterial population may comprise at least one strain of Ruminococcus sp. In some instances, a bacterial population may comprise at least one strain of Anaerbutyricum sp. In some instances, a bacterial population may comprise at least one strain of Anaerostipes sp. In some instances, a bacterial population may comprise at least one strain of Anaerotignum sp. In some instances, a bacterial population may comprise at least one strain of Bacillus sp. In some instances, a bacterial population may comprise at least one strain of Bacteroides sp. In some instances, a bacterial population may comprise at least one strain of Clostridium sp. In some instances, a bacterial population may comprise at least one strain of Collinsella sp. In some instances, a bacterial population may comprise at least one strain of Enterococcus sp. In some instances, a bacterial population may comprise at least one strain of Erysipelatoclostridium sp. In some instances, a bacterial population may comprise at least one strain of Escherichia sp. In some instances, a bacterial population may comprise at least one strain of Eubacterium sp. In some instances, a bacterial population may comprise at least one strain of Faecalicatena sp. In some instances, a bacterial population may comprise at least one strain of Holdemanella sp. In some instances, a bacterial population may comprise at least one strain of Lachnospira sp. In some instances, a bacterial population may comprise at least one strain of Longibaculum sp. In some instances, a bacterial population may comprise at least one strain of Paraprevotella sp. In some instances, a bacterial population may comprise at least one strain of Parabacteroides sp. In some instances, a bacterial population may comprise at least one strain of Pediococcus sp. In some instances, a bacterial population may comprise at least one strain of Veillonella sp.

[0140] In some instances, a bacterial population may comprise at least two strains of Vertebrate-Associated Lactobacillaceae, and/or at least two strains of Bifidobacterium sp., and/or at least two strains of Akkermansia sp., and/or at least two strains of Blautia sp. and/or at least two strains of Clostridium sp., and/or at least two strains of Coprococcus sp., and/or at least two strains of Dorea sp. and/or at least two strains of Faecalibacterium sp., and/or at least two strains of Roseburia sp., and/or at least two strains of Ruminococcus sp., and/or at least two strains of Anaerbutyricum sp., and/or at least two strains of Anaerostipes sp., and/or at least two strains of Anaerotignum sp., and/or at least two strains of Bacillus sp., and/or at least two strains of Bacteroides sp., and/or at least two strains of Clostridium sp., and/or at least two strains of Collinsella sp., and/or at least two strains of Enterococcus sp., and/or at least two strains of Erysipelatoclostridium sp., and/or at least two strains of Escherichia sp., and/or at least two strains of Eubacterium sp., and/or at least two strains of Faecalicatena sp., and/or at least two strains of Holdemanella sp., and/or at least two strains of Lachnospira sp., and/or at least two strains of Longibaculum sp., and/or at least two strains of Paraprevotella sp., and/or at least two strains of Parabacteroides sp., and/or at least two strains of Pediococcus sp., and/or at least two strains of Veillonella sp. In some cases, a bacterial population may comprise at least three strains of Vertebrate-Associated Lactobacillaceae, and/or at least three strains of Bifidobacterium sp., and/or at least three strains of Akkermansia sp., and/or at least three strains of Blautia sp. and/or at least three strains of Clostridium sp., and/or at least three strains of Coprococcus sp., and/or at least three strains of Dorea sp. and/or at least three strains of Faecalibacterium sp., and/or at least three strains of Roseburia sp., and/or at least three strains of Ruminococcus sp., and/or at least three strains of Anaerbutyricum sp., and/or at least three strains of Anaerostipes sp., and/or at least three strains of Anaerotignum sp., and/or at least three strains of Bacillus sp., and/or at least three strains of Bacteroides sp., and/or at least three strains of Clostridium sp., and/or at least three strains of Collinsella sp., and/or at least three strains of Enterococcus sp., and/or at least three strains of Erysipelatoclostridium sp., and/or at least three strains of Escherichia sp., and/or at least three strains of Eubacterium sp., and/or at least three strains of Faecalicatena sp., and/or at least three strains of Holdemanella sp., and/or at least three strains of Lachnospira sp., and/or at least three strains of Longibaculum sp., and/or at least three strains of Paraprevotella sp., and/or at least three strains of Parabacteroides sp., and/or at least three strains of Pediococcus sp., and/or at least three strains of Veillonella sp. In some cases, a bacterial population may comprise at least more than three strains of Vertebrate-Associated Lactobacillaceae, or at least more than three strains of Bifidobacterium sp., and/or at least more than three strains of Akkermansia sp., and/or at least more than three strains of Blautia sp. and/or at least more than three strains of Clostridium sp., and/or at least more than three strains of Coprococcus sp., and/or at least more than three strains of Dorea sp. and/or at least more than three strains of Faecalibacterium sp., and/or at least more than three strains of Roseburia sp., and/or at least more than three strains of Ruminococcus sp., and/or at least more than three strains of Anaerbutyricum sp., and/or at least more than three strains of Anaerostipes sp., and/or at least more than three strains of Anaerotignum sp., and/or at least more than three strains of Bacillus sp., and/or at least more than three strains of Bacteroides sp., and/or at least more than three strains of Clostridium sp., and/or at least more than three strains of Collinsella sp., and/or at least more than three strains of Enterococcus sp., and/or at least more than three strains of Erysipelatoclostridium sp., and/or at least more than three strains of Escherichia sp., and/or at least more than three strains of Eubacterium sp., and/or at least more than three strains of Faecalicatena sp., and/or at least more than three strains of Holdemanella sp., and/or at least more than three strains of Lachnospira sp., and/or at least more than three strains of Longibaculum sp., and/or at least more than three strains of Paraprevotella sp., and/or at least more than three strains of Parabacteroides sp., and/or at least more than three strains of Pediococcus sp., and/or at least more than three strains of Veillonella sp.

[0141] In some instances, a pharmaceutical composition that can comprise a bacterial population. Such bacterial population can comprise one or more different bacterial species and/or strains. Such bacterial species and/or strains can belong to one or more different bacterial phyla.

[0142] In some instances, a bacterial population may comprise one or more Akkermansia sp. The one or more Akkermansia sp. may include Akkermansia glycaniphila, or Akkermansia muciniphila, or a combination thereof.

[0143] In some instances, a bacterial population may comprise one or more Blautia sp. The one or more Blautia sp. may include Blautia acetigignens, Blautia ammoniilytica, Blautia argi, Blautia caecimuris, Blautia coccoides, Blautia faecicola, Blautia faecis, Blautia glucerasea, Blautia hansenii, Blautia honinis, Blautia hydrogenotrophica, Blautia intestinalis, Blautia liquoris, Blautia luti, Blautia obeum, Blautia producta, Blautia schinkii, Blautia stercoris, or Blautia wexlerae or a combination thereof.

[0144] In some instances, a bacterial population may comprise one or more Coprococcus sp. The one or more Coprococcus sp. may include Coprococcus ammoniilyticus, Coprococcus catus, Coprococcus comes, or Coprococcus eutactus or a combination thereof.

[0145] In some instances, a bacterial population may comprise one or more Dorea sp. The one or more Dorea sp. may include Dorea acetigenes, Dorea ammoniilytica, Dorea formicigenerans, or Dorea longicatena, or a combination thereof

[0146] In some instances, a bacterial population may comprise one or more Faecalibacterium sp. The one or more Faecalibacterium sp. may include Faecalibacterium butyricigenerans, Faecalibacterium duncaniae, Faecalibacterium gallinarum, Faecalibacterium hattorii, Faecalibacterium longum, or Faecalibacterium prausnitzii, or a combination thereof.

[0147] In some instances, a bacterial population may comprise one or more Roseburia sp. The one or more Roseburia sp. may include Roseburia cecicola, Roseburia faecis, Roseburia hominis, Roseburia intestinalis, or Roseburia inulinivorans or a combination thereof.

[0148] In some instances, a bacterial population may comprise one or more Ruminococcus sp. The one or more Ruminococcus sp. may include Ruminococcus albus, Ruminococcus bovis, Ruminococcus bromii, Ruminococcus callidus, Ruminococcus champanellensis, Ruminococcus faecis, Ruminococcus flavefaciens, Ruminococcus gauvreauii, Ruminococcus gnavus, Ruminococcus hansenii, Ruminococcus hydrogenotrophicus, Ruminococcus lactaris, Ruminococcus luti, Ruminococcus obeum, Ruminococcus palustris, Ruminococcus pasteurii, Ruminococcus productus, Ruminococcus schinkii, or Ruminococcus torques, or a combination thereof.

[0149] In some instances, a bacterial population may comprise one or more Anaerbutyricum sp. The one or more Anaerbutyricum sp. may include Anaerbutyricum hallii, Anaerbutyricum soehngenii, or a combination thereof.

[0150] In some instances, a bacterial population may comprise one or more Anaerostipes sp. The one or more Anaerostipes sp. may include Anaerostipes amylophilus, Anaerostipes butyraticus, Anaerostipes caccae, Anaerostipes faecalis, Anaerostipes hadrus, Anaerostipes hominis, or Anaerostipes rhamnosivorans, or a combination thereof.

[0151] In some instances, a bacterial population may comprise one or more Anaerotignum sp. The one or more Anaerotignum sp. may include Anaerotignum aminivorans, Anaerotignum faecicola, Anaerotignum lactatifermentans, Anaerotignum neopropionicum, or Anaerotignum propionicum, or a combination thereof.

[0152] In some instances, a bacterial population may comprise one or more Bacteroides sp. The one or more Bacteroides sp. may include Bacteroides acidifaciens, Bacteroides caccae, Bacteroides caecicola, Bacteroides caecigallinarum, Bacteroides caecimuris, Bacteroides cellulolyticus, Bacteroides cellulosilyticus, Bacteroides clarus, Bacteroides corporis, Bacteroides eggerthii, Bacteroides facilis, Bacteroides faecalis, Bacteroides faecichinchillae, Bacteroides faecis, Bacteroides finegoldii, Bacteroides fluxus, Bacteroides fragilis, Bacteroides galacturonicus, Bacteroides gallinaceum, Bacteroides gallinarum, Bacteroides graminisolvens, Bacteroides helcogenes, Bacteroides hominis, Bacteroides intestinalis, Bacteroides koreensis, Bacteroides kribbi, Bacteroides luhongzhouii, Bacteroides luti, Bacteroides nordii, Bacteroides oleiciplenus, Bacteroides ovatus, Bacteroides parvus, Bacteroides pectinophilus, Bacteroides polypragmatus, Bacteroides propionicifaciens, Bacteroides proionicigenes, Bacteroides pyogenes, Bacteroides reticulotermitis, Bacteroides rodentium, Bacteroides salyersiae, Bacteroides stercorirosoris, Bacteroides stercoris, Bacteroides thetaiotaomicron, Bacteroides uniformis, Bacteroides xylanisolvens, or Bacteroides zhangwengongii, or a combination thereof.

[0153] In some instances, a bacterial population may comprise one or more Clostridium sp. The one or more Clostridium sp. may include Clostridium aerotolerans, Clostridium aminophilum, Clostridium coccoides, Clostridium nexile, Clostridium polysaccharolyticum, Clostridium symbiosum, Clostridium sphenoides, Clostridium xylanolyticum, Clostridium leptum, Clostridium cellulosi, Clostridium sordelli, or Clostridium scindens, or a combination thereof.

[0154] In some instances, a bacterial population may comprise one or more Collinsella sp. The one or more Collinsella sp. may include Collinsella aerofaciens, Collinsella intestinalis, Collinsella massiliensis, Collinsella stercoris, Collinsella tanakaei, or Collinsella vaginalis, or a combination thereof.

[0155] In some instances, a bacterial population may comprise one or more Enterococcus sp. The one or more Enterococcus sp. may include Enterococcus alcedinis, Enterococcus alishanensis, Enterococcus aquimarinus, Enterococcus asini, Enterococcus avium, Enterococcus bulliens, Enterococcus caccae, Enterococcus camelliae, Enterococcus canintestini, Enterococcus canis, Enterococcus casseliflavus, Enterococcus cecorum, Enterococcus columbae, Enterococcus crotali, Enterococcus devriesei, Enterococcus diestrammenae, Enterococcus dispar, Enterococcus dongliensis, Enterococcus durans, Enterococcus eurekensis, Enterococcus faecalis, Enterococcus faeciu, Enterococcus florum, Enterococcus gallinarum, Enterococcus gilvus, Enterococcus haemoperoxidus, Enterococcus hermanniensis, Enterococcus hirae, Enterococcus hulanensis, Enterococcus innesii, Enterococcus italicus, Enterococcus lactis, Enterococcus larvae, Enterococcus lemanii, Enterococcus malodoratus, Enterococcus moraviensis, Enterococcus mundtii, Enterococcus nangangensis, Enterococcus olivae, Enterococcus pallens, Enterococcus phoeniculicola, Enterococcus pingfangensis, Enterococcus plantarum, Enterococcus pseudoavium, Enterococcus quebecensis, Enterococcus raffinosus, Enterococcus ratti, Enterococcus rivorum, Enterococcus rotai, Enterococcus saccharolyticus, Enterococcus saigonensis, Enterococcus silesiacus, Enterococcus songbeiensis, Enterococcus sulfureus, Enterococcus termitis, Enterococcus thilandicus, Enterococcus ureasiticus, Enterococcus ureilyticus, Enterococcus viikkiensis, Enterococcus villorum, Enterococcus wangshanyuanii, or Enterococcus xiangfangensis, or a combination thereof.

[0156] In some instances, a bacterial population may comprise one or more Escherichia sp. The one or more Escherichia sp. may include Escherichia albertii, Escherichia coli, Escherichia fergusonii, Escherichia hermanni, Escherichia marmotae, or Escherichia ruysiae, or a combination thereof.

[0157] In some instances, a bacterial population may comprise one or more Eubacterium sp. The one or more Eubacterium sp. may Eubacterium aggregans, Eubacterium barkeri, Eubacterium brachy, Eubacterium callanderi, Eubacterium cellulosolvens, Eubacterium coprostanoligenes, Eubacterium hominis, Eubacterium infirmum, Eubacterium limosum, Eubacterium maltosivorans, Eubacterium minutum, Eubacterium multiforme, Eubacterium nodatum, Eubacterium oxidoreducens, Eubacterium plexicaudatum, Eubacterium pyruvativorans, Eubacterium ramulus, Eubacterium ruminantium, Eubacterium saphenum, Eubacterium siraeum, Eubacterium tenue, Eubacterium tortuosum, Eubacterium uniforme, Eubacterium ventriosum, Eubacterium xylanophilum, or Eubacterium yurii, or a combination thereof.

[0158] In some instances, a bacterial population may comprise one or more Faecalicatena sp. The one or more Faecalicatena sp. may include Faecalicatena absiana, Faecalicatena acetigenes, Faecalicatena contorta, Faecalicatena fissicatena, or Faecalicatena orotica, or a combination thereof.

[0159] In some instances, a bacterial population may comprise one or more Holdemanella sp. The one or more Holdemanella sp. may include Holdemanella biformi or Holdemanella proci, or a combination thereof.

[0160] In some instances, a bacterial population may comprise one or more Lachnospira sp. The one or more Lachnospira sp. may include Lachnospira eligens, Lachnospira multipara, or Lachnospira pectinoschiza, or a combination thereof.

[0161] In some instances, a bacterial population may comprise one or more Longibaculum sp. The one or more Longibaculum sp. may include Longibaculum muris.

[0162] In some instances, a bacterial population may comprise one or more Paraprevotella sp. The one or more Paraprevotella sp. may include Paraprevotella clara, or Paraprevotella xylaniphila, or a combination thereof.

[0163] In some instances, a bacterial population may comprise one or more Parabacteroides a sp. The one or more Parabacteroides sp. may include Parabacteroides acidifaciens, Parabacteroides chartae, Parabacteroides chinchilla, Parabacteroides chongii, Parabacteroides distasonis, Parabacteroides faecis, Parabacteroides goldsteinii, Parabacteroides gordonii, Parabacteroides hominis, Parabacteroides johnsonii, or Parabacteroides merdae, or a combination thereof.

[0164] In some instances, a bacterial population may comprise one or more Pediococcus sp. The one or more Pediococcus sp. may include Pediococcus acidilactici, Pediococcus argentinicus, Pediococcus cellicola, Pediococcus claussenii, Pediococcus damnosus, Pediococcus ethanolidurans, Pediococcus inopinatus, Pediococcus parvulus, Pediococcus pentosaceus, Pediococcus siamensis, or Pediococcus stilesii, or a combination thereof.

[0165] In some instances, a bacterial population may comprise one or more Veillonella sp. The one or more Veillonella sp. may include Veillonella atypica, Veillonella caviae, Veillonella cricetid, Veillonella denticariosi, Veillonella dispar, Veillonella hominis, Veillonellan infantium, Veillonella magna, Veillonella montpellierensis, Veillonella nakazawae, Veillonella parvula, Veillonella ratti, Veillonella rodentium, Veillonella rogosae, Veillonella seminalis, or Veillonella tobetseunsis, or a combination thereof.

[0166] In some instances, a bacterial strain described herein may be derived from a subject of an organ or tissue thereof. As used herein, when referring to a microbial organism being “derived from,” a subject or an organ/tissue thereof, is equivalent to the microbial organism being obtained originates from the microbiota of the subject of the organ/tissue thereof.

[0167] In some instances, a bacterial strain described herein may be derived from a vagina. In some instances, a bacterial strain described herein may be derived from a mammalian vagina. In some instances, a bacterial strain described herein may be derived from a human vagina. In some instances, a bacterial strain described herein may be derived from a human that does not have a disease or disease condition. In some instances, a bacterial strain described herein may be derived from a human that does not have a vaginal disease or disease condition, complication of the vaginal disease or disease condition or a risk thereof. In some instances, a bacterial strain described herein may be derived from a human that does not have BV or a risk thereof. In some instances, a bacterial strain described herein may be derived from a gastrointestinal tract. In some instances, a bacterial strain described herein may be derived from a mammalian gastrointestinal tract. In some instances, a bacterial strain described herein may be derived from a human gastrointestinal tract. In some instances, a bacterial strain described herein may be derived from a human infant gastrointestinal tract. In some instances, a bacterial strain described herein may be derived from a human infant gastrointestinal tract, wherein the infant is a preterm infant. In some instances, a bacterial strain described herein may be derived from a human that does not have a gastrointestinal disease or disease condition or a risk thereof. In some instances, a bacterial strain described herein may be derived from a human that does not have an infant gastrointestinal disease or disease condition or a risk thereof. In some instances, a bacterial strain described herein may be derived from an infant that does not have NEC or a risk thereof. In some instances, a bacterial strain described herein may be derived from a human that does not have a disease or disease condition or a risk thereof. In some instances, a bacterial strain described herein may be derived from a human that is healthy. In some cases, when deriving the bacterial strain as described herein, the bacterial strain can be derived from the microbiota of the subjects, organs, or tissues as described herein. In some instances, a bacterial population may comprise purified bacterial strains. In some cases, In some instances, a bacterial strain described herein may not comprise a recombinant genetic modification. In some cases, a bacterial strain described herein may not be genetically engineered.

### Sequences

[0168] The bacterial strain described herein can comprise a sequence having a sequence identity that is at least about 80%, at least about 85%, at least about 90%, at least about 91%, at least about 92%, at least about 93%, at least about 94%, at least about 95%, at least about 96%, at least about 97%, at least about 98%, at least about 99%, at least about 99.9%, at least about 99.99%, at least about 99.999%, at least about 99.9999%, at least about 99.99999% or more to any one of SEQ ID NOs: 1-30. The bacterial strain described herein can comprise a sequence having a sequence identity that is at most about 80%, at most about 85%, at most about 90%, at most about 91%, at most about 92%, at most about 93%, at most about 94%, at most about 95%, at most about 96%, at most about 97%, at most about 98%, at most about 99%, at most about 99.9%, at most about 99.99%, at most about 99.999%, at most about 99.9999%, or at most about 99.999999% to any one of SEQ ID NOs: 1-30. The bacterial strain described herein can comprise a sequence that has at least about 1, at least about 2, at least about 3, at least about 4, at least about 5, at least about 10, at least about 100, at least about 1000, at least about 10000, at least about 100000, at least about 1000000 or more nucleotide differences relative to any one of SEQ ID NOs: 1-30. The bacterial strain described herein can comprise a sequence that has at most about 1 nucleotide, at most about 2, at most about 3, at most about 4, at most about 5, at most about 10, at most about 100, at most about 1000, at most about 10000, at most about 100000, or at most about 1000000 nucleotide differences relative to any one of SEQ ID NOs: 1-30. The bacterial strain described herein can comprise a sequence having a sequence identity that is 100% to any one of SEQ ID NOs: 1-30.

[0169] The bacterial strain described herein can comprise a sequence having a sequence identity that is at least about 80%, at least about 85%, at least about 90%, at least about 91%, at least about 92%, at least about 93%, at least about 94%, at least about 95%, at least about 96%, at least about 97%, at least about 98%, at least about 99%, at least about 99.9%, at least about 99.99%, at least about 99.999%, at least about 99.9999%, at least about 99.99999% or more to SEQ ID NO: 1. The bacterial strain described herein can comprise a sequence having a sequence identity that is at most about 80%, at most about 85%, at most about 90%, at most about 91%, at most about 92%, at most about 93%, at most about 94%, at most about 95%, at most about 96%, at most about 97%, at most about 98%, at most about 99%, at most about 99.9%, at most about 99.99%, at most about 99.999%, at most about 99.9999%, or at most about 99.99999% to SEQ ID NO: 1. The bacterial strain described herein can comprise a sequence that has at least about 1, at least about 2, at least about 3, at least about 4, at least about 5, at least about 10, at least about 100, at least about 1000, at least about 10000, at least about 100000, at least about 1000000 or more nucleotide differences relative to SEQ ID NO: 1. The bacterial strain described herein can comprise a sequence that has at most about 1 nucleotide, at most about 2, at most about 3, at most about 4, at most about 5, at most about 10, at most about 100, at most about 1000, at most about 10000, at most about 100000, or at most about 1000000 nucleotide differences relative to SEQ ID NO: 1. The bacterial strain described herein can comprise a sequence having a sequence identity that is 100% to SEQ ID NO: 1.

[0170] The bacterial strain described herein can comprise a sequence having a sequence identity that is at least about 80%, at least about 85%, at least about 90%, at least about 91%, at least about 92%, at least about 93%, at least about 94%, at least about 95%, at least about 96%, at least about 97%, at least about 98%, at least about 99%, at least about 99.9%, at least about 99.99%, at least about 99.999%, at least about 99.9999%, at least about 99.99999% or more to SEQ ID NO: 2. The bacterial strain described herein can comprise a sequence having a sequence identity that is at most about 80%, at most about 85%, at most about 90%, at most about 91%, at most about 92%, at most about 93%, at most about 94%, at most about 95%, at most about 96%, at most about 97%, at most about 98%, at most about 99%, at most about 99.9%, at most about 99.99%, at most about 99.999%, at most about 99.9999%, or at most about 99.99999% to SEQ ID NO: 2. The bacterial strain described herein can comprise a sequence that has at least about 1, at least about 2, at least about 3, at least about 4, at least about 5, at least about 10, at least about 100, at least about 1000, at least about 10000, at least about 100000, at least about 1000000 or more nucleotide differences relative to SEQ ID NO: 2. The bacterial strain described herein can comprise a sequence that has at most about 1 nucleotide, at most about 2, at most about 3, at most about 4, at most about 5, at most about 10, at most about 100, at most about 1000, at most about 10000, at most about 100000, or at most about 1000000 nucleotide differences relative to SEQ ID NO: 2. The bacterial strain described herein can comprise a sequence having a sequence identity that is 100% to SEQ ID NO: 2.

[0171] The bacterial strain described herein can comprise a sequence having a sequence identity that is at least about 80%, at least about 85%, at least about 90%, at least about 91%, at least about 92%, at least about 93%, at least about 94%, at least about 95%, at least about 96%, at least about 97%, at least about 98%, at least about 99%, at least about 99.9%, at least about 99.99%, at least about 99.999%, at least about 99.9999%, at least about 99.99999% or more to SEQ ID NO: 3. The bacterial strain described herein can comprise a sequence having a sequence identity that is at most about 80%, at most about 85%, at most about 90%, at most about 91%, at most about 92%, at most about 93%, at most about 94%, at most about 95%, at most about 96%, at most about 97%, at most about 98%, at most about 99%, at most about 99.9%, at most about 99.99%, at most about 99.999%, at most about 99.9999%, or at most about 99.99999% to SEQ ID NO: 3. The bacterial strain described herein can comprise a sequence that has at least about 1, at least about 2, at least about 3, at least about 4, at least about 5, at least about 10, at least about 100, at least about 1000, at least about 10000, at least about 100000, at least about 1000000 or more nucleotide differences relative to SEQ ID NO: 3. The bacterial strain described herein can comprise a sequence that has at most about 1 nucleotide, at most about 2, at most about 3, at most about 4, at most about 5, at most about 10, at most about 100, at most about 1000, at most about 10000, at most about 100000, or at most about 1000000 nucleotide differences relative to SEQ ID NO: 3. The bacterial strain described herein can comprise a sequence having a sequence identity that is 100% to SEQ ID NO: 3.

[0172] The bacterial strain described herein can comprise a sequence having a sequence identity that is at least about 80%, at least about 85%, at least about 90%, at least about 91%, at least about 92%, at least about 93%, at least about 94%, at least about 95%, at least about 96%, at least about 97%, at least about 98%, at least about 99%, at least about 99.9%, at least about 99.99%, at least about 99.999%, at least about 99.9999%, at least about 99.99999% or more to SEQ ID NO: 4. The bacterial strain described herein can comprise a sequence having a sequence identity that is at most about 80%, at most about 85%, at most about 90%, at most about 91%, at most about 92%, at most about 93%, at most about 94%, at most about 95%, at most about 96%, at most about 97%, at most about 98%, at most about 99%, at most about 99.9%, at most about 99.99%, at most about 99.999%, at most about 99.9999%, or at most about 99.99999% to SEQ ID NO: 4. The bacterial strain described herein can comprise a sequence that has at least about 1, at least about 2, at least about 3, at least about 4, at least about 5, at least about 10, at least about 100, at least about 1000, at least about 10000, at least about 100000, at least about 1000000 or more nucleotide differences relative to SEQ ID NO: 4. The bacterial strain described herein can comprise a sequence that has at most about 1 nucleotide, at most about 2, at most about 3, at most about 4, at most about 5, at most about 10, at most about 100, at most about 1000, at most about 10000, at most about 100000, or at most about 1000000 nucleotide differences relative to SEQ ID NO: 4. The bacterial strain described herein can comprise a sequence having a sequence identity that is 100% to SEQ ID NO: 4.

[0173] The bacterial strain described herein can comprise a sequence having a sequence identity that is at least about 80%, at least about 85%, at least about 90%, at least about 91%, at least about 92%, at least about 93%, at least about 94%, at least about 95%, at least about 96%, at least about 97%, at least about 98%, at least about 99%, at least about 99.9%, at least about 99.99%, at least about 99.999%, at least about 99.9999%, at least about 99.99999% or more to SEQ ID NO: 5. The bacterial strain described herein can comprise a sequence having a sequence identity that is at most about 80%, at most about 85%, at most about 90%, at most about 91%, at most about 92%, at most about 93%, at most about 94%, at most about 95%, at most about 96%, at most about 97%, at most about 98%, at most about 99%, at most about 99.9%, at most about 99.99%, at most about 99.999%, at most about 99.9999%, or at most about 99.99999% to SEQ ID NO: 5. The bacterial strain described herein can comprise a sequence that has at least about 1, at least about 2, at least about 3, at least about 4, at least about 5, at least about 10, at least about 100, at least about 1000, at least about 10000, at least about 100000, at least about 1000000 or more nucleotide differences relative to SEQ ID NO: 5. The bacterial strain described herein can comprise a sequence that has at most about 1 nucleotide, at most about 2, at most about 3, at most about 4, at most about 5, at most about 10, at most about 100, at most about 1000, at most about 10000, at most about 100000, or at most about 1000000 nucleotide differences relative to SEQ ID NO: 5. The bacterial strain described herein can comprise a sequence having a sequence identity that is 100% to SEQ ID NO: 5.

[0174] The bacterial strain described herein can comprise a sequence having a sequence identity that is at least about 80%, at least about 85%, at least about 90%, at least about 91%, at least about 92%, at least about 93%, at least about 94%, at least about 95%, at least about 96%, at least about 97%, at least about 98%, at least about 99%, at least about 99.9%, at least about 99.99%, at least about 99.999%, at least about 99.9999%, at least about 99.99999% or more to SEQ ID NO: 6. The bacterial strain described herein can comprise a sequence having a sequence identity that is at most about 80%, at most about 85%, at most about 90%, at most about 91%, at most about 92%, at most about 93%, at most about 94%, at most about 95%, at most about 96%, at most about 97%, at most about 98%, at most about 99%, at most about 99.9%, at most about 99.99%, at most about 99.999%, at most about 99.9999%, or at most about 99.99999% to SEQ ID NO: 6. The bacterial strain described herein can comprise a sequence that has at least about 1, at least about 2, at least about 3, at least about 4, at least about 5, at least about 10, at least about 100, at least about 1000, at least about 10000, at least about 100000, at least about 1000000 or more nucleotide differences relative to SEQ ID NO: 6. The bacterial strain described herein can comprise a sequence that has at most about 1 nucleotide, at most about 2, at most about 3, at most about 4, at most about 5, at most about 10, at most about 100, at most about 1000, at most about 10000, at most about 100000, or at most about 1000000 nucleotide differences relative to SEQ ID NO: 6. The bacterial strain described herein can comprise a sequence having a sequence identity that is 100% to SEQ ID NO: 6.

[0175] The bacterial strain described herein can comprise a sequence having a sequence identity that is at least about 80%, at least about 85%, at least about 90%, at least about 91%, at least about 92%, at least about 93%, at least about 94%, at least about 95%, at least about 96%, at least about 97%, at least about 98%, at least about 99%, at least about 99.9%, at least about 99.99%, at least about 99.999%, at least about 99.9999%, at least about 99.99999% or more to SEQ ID NO: 7. The bacterial strain described herein can comprise a sequence having a sequence identity that is at most about 80%, at most about 85%, at most about 90%, at most about 91%, at most about 92%, at most about 93%, at most about 94%, at most about 95%, at most about 96%, at most about 97%, at most about 98%, at most about 99%, at most about 99.9%, at most about 99.99%, at most about 99.999%, at most about 99.9999%, or at most about 99.99999% to SEQ ID NO: 7. The bacterial strain described herein can comprise a sequence that has at least about 1, at least about 2, at least about 3, at least about 4, at least about 5, at least about 10, at least about 100, at least about 1000, at least about 10000, at least about 100000, at least about 1000000 or more nucleotide differences relative to SEQ ID NO: 7. The bacterial strain described herein can comprise a sequence that has at most about 1 nucleotide, at most about 2, at most about 3, at most about 4, at most about 5, at most about 10, at most about 100, at most about 1000, at most about 10000, at most about 100000, or at most about 1000000 nucleotide differences relative to SEQ ID NO: 7. The bacterial strain described herein can comprise a sequence having a sequence identity that is 100% to SEQ ID NO: 7.

[0176] The bacterial strain described herein can comprise a sequence having a sequence identity that is at least about 80%, at least about 85%, at least about 90%, at least about 91%, at least about 92%, at least about 93%, at least about 94%, at least about 95%, at least about 96%, at least about 97%, at least about 98%, at least about 99%, at least about 99.9%, at least about 99.99%, at least about 99.999%, at least about 99.9999%, at least about 99.99999% or more to SEQ ID NO: 8. The bacterial strain described herein can comprise a sequence having a sequence identity that is at most about 80%, at most about 85%, at most about 90%, at most about 91%, at most about 92%, at most about 93%, at most about 94%, at most about 95%, at most about 96%, at most about 97%, at most about 98%, at most about 99%, at most about 99.9%, at most about 99.99%, at most about 99.999%, at most about 99.9999%, or at most about 99.99999% to SEQ ID NO: 8. The bacterial strain described herein can comprise a sequence that has at least about 1, at least about 2, at least about 3, at least about 4, at least about 5, at least about 10, at least about 100, at least about 1000, at least about 10000, at least about 100000, at least about 1000000 or more nucleotide differences relative to SEQ ID NO: 8. The bacterial strain described herein can comprise a sequence that has at most about 1 nucleotide, at most about 2, at most about 3, at most about 4, at most about 5, at most about 10, at most about 100, at most about 1000, at most about 10000, at most about 100000, or at most about 1000000 nucleotide differences relative to SEQ ID NO: 8. The bacterial strain described herein can comprise a sequence having a sequence identity that is 100% to SEQ ID NO: 8.

[0177] The bacterial strain described herein can comprise a sequence having a sequence identity that is at least about 80%, at least about 85%, at least about 90%, at least about 91%, at least about 92%, at least about 93%, at least about 94%, at least about 95%, at least about 96%, at least about 97%, at least about 98%, at least about 99%, at least about 99.9%, at least about 99.99%, at least about 99.999%, at least about 99.9999%, at least about 99.99999% or more to SEQ ID NO: 9. The bacterial strain described herein can comprise a sequence having a sequence identity that is at most about 80%, at most about 85%, at most about 90%, at most about 91%, at most about 92%, at most about 93%, at most about 94%, at most about 95%, at most about 96%, at most about 97%, at most about 98%, at most about 99%, at most about 99.9%, at most about 99.99%, at most about 99.999%, at most about 99.9999%, or at most about 99.99999% to SEQ ID NO: 9. The bacterial strain described herein can comprise a sequence that has at least about 1, at least about 2, at least about 3, at least about 4, at least about 5, at least about 10, at least about 100, at least about 1000, at least about 10000, at least about 100000, at least about 1000000 or more nucleotide differences relative to SEQ ID NO: 9. The bacterial strain described herein can comprise a sequence that has at most about 1 nucleotide, at most about 2, at most about 3, at most about 4, at most about 5, at most about 10, at most about 100, at most about 1000, at most about 10000, at most about 100000, or at most about 1000000 nucleotide differences relative to SEQ ID NO: 9. The bacterial strain described herein can comprise a sequence having a sequence identity that is 100% to SEQ ID NO: 9.

[0178] The bacterial strain described herein can comprise a sequence having a sequence identity that is at least about 80%, at least about 85%, at least about 90%, at least about 91%, at least about 92%, at least about 93%, at least about 94%, at least about 95%, at least about 96%, at least about 97%, at least about 98%, at least about 99%, at least about 99.9%, at least about 99.99%, at least about 99.999%, at least about 99.9999%, at least about 99.99999% or more to SEQ ID NO: 10. The bacterial strain described herein can comprise a sequence having a sequence identity that is at most about 80%, at most about 85%, at most about 90%, at most about 91%, at most about 92%, at most about 93%, at most about 94%, at most about 95%, at most about 96%, at most about 97%, at most about 98%, at most about 99%, at most about 99.9%, at most about 99.99%, at most about 99.999%, at most about 99.9999%, or at most about 99.99999% to SEQ ID NO: 10. The bacterial strain described herein can comprise a sequence that has at least about 1, at least about 2, at least about 3, at least about 4, at least about 5, at least about 10, at least about 100, at least about 1000, at least about 10000, at least about 100000, at least about 1000000 or more nucleotide differences relative to SEQ ID NO: 10. The bacterial strain described herein can comprise a sequence that has at most about 1 nucleotide, at most about 2, at most about 3, at most about 4, at most about 5, at most about 10, at most about 100, at most about 1000, at most about 10000, at most about 100000, or at most about 1000000 nucleotide differences relative to SEQ ID NO: 10. The bacterial strain described herein can comprise a sequence having a sequence identity that is 100% to SEQ ID NO: 10.

[0179] The bacterial strain described herein can comprise a sequence having a sequence identity that is at least about 80%, at least about 85%, at least about 90%, at least about 91%, at least about 92%, at least about 93%, at least about 94%, at least about 95%, at least about 96%, at least about 97%, at least about 98%, at least about 99%, at least about 99.9%, at least about 99.99%, at least about 99.999%, at least about 99.9999%, at least about 99.99999% or more to SEQ ID NO: 11. The bacterial strain described herein can comprise a sequence having a sequence identity that is at most about 80%, at most about 85%, at most about 90%, at most about 91%, at most about 92%, at most about 93%, at most about 94%, at most about 95%, at most about 96%, at most about 97%, at most about 98%, at most about 99%, at most about 99.9%, at most about 99.99%, at most about 99.999%, at most about 99.9999%, or at most about 99.99999% to SEQ ID NO: 11. The bacterial strain described herein can comprise a sequence that has at least about 1, at least about 2, at least about 3, at least about 4, at least about 5, at least about 10, at least about 100, at least about 1000, at least about 10000, at least about 100000, at least about 1000000 or more nucleotide differences relative to SEQ ID NO: 11. The bacterial strain described herein can comprise a sequence that has at most about 1 nucleotide, at most about 2, at most about 3, at most about 4, at most about 5, at most about 10, at most about 100, at most about 1000, at most about 10000, at most about 100000, or at most about 1000000 nucleotide differences relative to SEQ ID NO: 11. The bacterial strain described herein can comprise a sequence having a sequence identity that is 100% to SEQ ID NO: 11.

[0180] The bacterial strain described herein can comprise a sequence having a sequence identity that is at least about 80%, at least about 85%, at least about 90%, at least about 91%, at least about 92%, at least about 93%, at least about 94%, at least about 95%, at least about 96%, at least about 97%, at least about 98%, at least about 99%, at least about 99.9%, at least about 99.99%, at least about 99.999%, at least about 99.9999%, at least about 99.99999% or more to SEQ ID NO: 12. The bacterial strain described herein can comprise a sequence having a sequence identity that is at most about 80%, at most about 85%, at most about 90%, at most about 91%, at most about 92%, at most about 93%, at most about 94%, at most about 95%, at most about 96%, at most about 97%, at most about 98%, at most about 99%, at most about 99.9%, at most about 99.99%, at most about 99.999%, at most about 99.9999%, or at most about 99.99999% to SEQ ID NO: 12. The bacterial strain described herein can comprise a sequence that has at least about 1, at least about 2, at least about 3, at least about 4, at least about 5, at least about 10, at least about 100, at least about 1000, at least about 10000, at least about 100000, at least about 1000000 or more nucleotide differences relative to SEQ ID NO: 12. The bacterial strain described herein can comprise a sequence that has at most about 1 nucleotide, at most about 2, at most about 3, at most about 4, at most about 5, at most about 10, at most about 100, at most about 1000, at most about 10000, at most about 100000, or at most about 1000000 nucleotide differences relative to SEQ ID NO: 12. The bacterial strain described herein can comprise a sequence having a sequence identity that is 100% to SEQ ID NO: 12.

[0181] The bacterial strain described herein can comprise a sequence having a sequence identity that is at least about 80%, at least about 85%, at least about 90%, at least about 91%, at least about 92%, at least about 93%, at least about 94%, at least about 95%, at least about 96%, at least about 97%, at least about 98%, at least about 99%, at least about 99.9%, at least about 99.99%, at least about 99.999%, at least about 99.9999%, at least about 99.99999% or more to SEQ ID NO: 13. The bacterial strain described herein can comprise a sequence having a sequence identity that is at most about 80%, at most about 85%, at most about 90%, at most about 91%, at most about 92%, at most about 93%, at most about 94%, at most about 95%, at most about 96%, at most about 97%, at most about 98%, at most about 99%, at most about 99.9%, at most about 99.99%, at most about 99.999%, at most about 99.9999%, or at most about 99.99999% to SEQ ID NO: 13. The bacterial strain described herein can comprise a sequence that has at least about 1, at least about 2, at least about 3, at least about 4, at least about 5, at least about 10, at least about 100, at least about 1000, at least about 10000, at least about 100000, at least about 1000000 or more nucleotide differences relative to SEQ ID NO: 13. The bacterial strain described herein can comprise a sequence that has at most about 1 nucleotide, at most about 2, at most about 3, at most about 4, at most about 5, at most about 10, at most about 100, at most about 1000, at most about 10000, at most about 100000, or at most about 1000000 nucleotide differences relative to SEQ ID NO: 13. The bacterial strain described herein can comprise a sequence having a sequence identity that is 100% to SEQ ID NO: 13.

[0182] The bacterial strain described herein can comprise a sequence having a sequence identity that is at least about 80%, at least about 85%, at least about 90%, at least about 91%, at least about 92%, at least about 93%, at least about 94%, at least about 95%, at least about 96%, at least about 97%, at least about 98%, at least about 99%, at least about 99.9%, at least about 99.99%, at least about 99.999%, at least about 99.9999%, at least about 99.99999% or more to SEQ ID NO: 14. The bacterial strain described herein can comprise a sequence having a sequence identity that is at most about 80%, at most about 85%, at most about 90%, at most about 91%, at most about 92%, at most about 93%, at most about 94%, at most about 95%, at most about 96%, at most about 97%, at most about 98%, at most about 99%, at most about 99.9%, at most about 99.99%, at most about 99.999%, at most about 99.9999%, or at most about 99.99999% to SEQ ID NO: 14. The bacterial strain described herein can comprise a sequence that has at least about 1, at least about 2, at least about 3, at least about 4, at least about 5, at least about 10, at least about 100, at least about 1000, at least about 10000, at least about 100000, at least about 1000000 or more nucleotide differences relative to SEQ ID NO: 14. The bacterial strain described herein can comprise a sequence that has at most about 1 nucleotide, at most about 2, at most about 3, at most about 4, at most about 5, at most about 10, at most about 100, at most about 1000, at most about 10000, at most about 100000, or at most about 1000000 nucleotide differences relative to SEQ ID NO: 14. The bacterial strain described herein can comprise a sequence having a sequence identity that is 100% to SEQ ID NO: 14.

[0183] The bacterial strain described herein can comprise a sequence having a sequence identity that is at least about 80%, at least about 85%, at least about 90%, at least about 91%, at least about 92%, at least about 93%, at least about 94%, at least about 95%, at least about 96%, at least about 97%, at least about 98%, at least about 99%, at least about 99.9%, at least about 99.99%, at least about 99.999%, at least about 99.9999%, at least about 99.99999% or more to SEQ ID NO: 15. The bacterial strain described herein can comprise a sequence having a sequence identity that is at most about 80%, at most about 85%, at most about 90%, at most about 91%, at most about 92%, at most about 93%, at most about 94%, at most about 95%, at most about 96%, at most about 97%, at most about 98%, at most about 99%, at most about 99.9%, at most about 99.99%, at most about 99.999%, at most about 99.9999%, or at most about 99.99999% to SEQ ID NO: 15. The bacterial strain described herein can comprise a sequence that has at least about 1, at least about 2, at least about 3, at least about 4, at least about 5, at least about 10, at least about 100, at least about 1000, at least about 10000, at least about 100000, at least about 1000000 or more nucleotide differences relative to SEQ ID NO: 15. The bacterial strain described herein can comprise a sequence that has at most about 1 nucleotide, at most about 2, at most about 3, at most about 4, at most about 5, at most about 10, at most about 100, at most about 1000, at most about 10000, at most about 100000, or at most about 1000000 nucleotide differences relative to SEQ ID NO: 15. The bacterial strain described herein can comprise a sequence having a sequence identity that is 100% to SEQ ID NO: 15.

[0184] The bacterial strain described herein can comprise a sequence having a sequence identity that is at least about 80%, at least about 85%, at least about 90%, at least about 91%, at least about 92%, at least about 93%, at least about 94%, at least about 95%, at least about 96%, at least about 97%, at least about 98%, at least about 99%, at least about 99.9%, at least about 99.99%, at least about 99.999%, at least about 99.9999%, at least about 99.99999% or more to SEQ ID NO: 16. The bacterial strain described herein can comprise a sequence having a sequence identity that is at most about 80%, at most about 85%, at most about 90%, at most about 91%, at most about 92%, at most about 93%, at most about 94%, at most about 95%, at most about 96%, at most about 97%, at most about 98%, at most about 99%, at most about 99.9%, at most about 99.99%, at most about 99.999%, at most about 99.9999%, or at most about 99.99999% to SEQ ID NO: 16. The bacterial strain described herein can comprise a sequence that has at least about 1, at least about 2, at least about 3, at least about 4, at least about 5, at least about 10, at least about 100, at least about 1000, at least about 10000, at least about 100000, at least about 1000000 or more nucleotide differences relative to SEQ ID NO: 16. The bacterial strain described herein can comprise a sequence that has at most about 1 nucleotide, at most about 2, at most about 3, at most about 4, at most about 5, at most about 10, at most about 100, at most about 1000, at most about 10000, at most about 100000, or at most about 1000000 nucleotide differences relative to SEQ ID NO: 16. The bacterial strain described herein can comprise a sequence having a sequence identity that is 100% to SEQ ID NO: 16.

[0185] The bacterial strain described herein can comprise a sequence having a sequence identity that is at least about 80%, at least about 85%, at least about 90%, at least about 91%, at least about 92%, at least about 93%, at least about 94%, at least about 95%, at least about 96%, at least about 97%, at least about 98%, at least about 99%, at least about 99.9%, at least about 99.99%, at least about 99.999%, at least about 99.9999%, at least about 99.99999% or more to SEQ ID NO: 17. The bacterial strain described herein can comprise a sequence having a sequence identity that is at most about 80%, at most about 85%, at most about 90%, at most about 91%, at most about 92%, at most about 93%, at most about 94%, at most about 95%, at most about 96%, at most about 97%, at most about 98%, at most about 99%, at most about 99.9%, at most about 99.99%, at most about 99.999%, at most about 99.9999%, or at most about 99.99999% to SEQ ID NO: 17. The bacterial strain described herein can comprise a sequence that has at least about 1, at least about 2, at least about 3, at least about 4, at least about 5, at least about 10, at least about 100, at least about 1000, at least about 10000, at least about 100000, at least about 1000000 or more nucleotide differences relative to SEQ ID NO: 17. The bacterial strain described herein can comprise a sequence that has at most about 1 nucleotide, at most about 2, at most about 3, at most about 4, at most about 5, at most about 10, at most about 100, at most about 1000, at most about 10000, at most about 100000, or at most about 1000000 nucleotide differences relative to SEQ ID NO: 17. The bacterial strain described herein can comprise a sequence having a sequence identity that is 100% to SEQ ID NO: 17.

[0186] The bacterial strain described herein can comprise a sequence having a sequence identity that is at least about 80%, at least about 85%, at least about 90%, at least about 91%, at least about 92%, at least about 93%, at least about 94%, at least about 95%, at least about 96%, at least about 97%, at least about 98%, at least about 99%, at least about 99.9%, at least about 99.99%, at least about 99.999%, at least about 99.9999%, at least about 99.99999% or more to SEQ ID NO: 18. The bacterial strain described herein can comprise a sequence having a sequence identity that is at most about 80%, at most about 85%, at most about 90%, at most about 91%, at most about 92%, at most about 93%, at most about 94%, at most about 95%, at most about 96%, at most about 97%, at most about 98%, at most about 99%, at most about 99.9%, at most about 99.99%, at most about 99.999%, at most about 99.9999%, or at most about 99.99999% to SEQ ID NO: 18. The bacterial strain described herein can comprise a sequence that has at least about 1, at least about 2, at least about 3, at least about 4, at least about 5, at least about 10, at least about 100, at least about 1000, at least about 10000, at least about 100000, at least about 1000000 or more nucleotide differences relative to SEQ ID NO: 18. The bacterial strain described herein can comprise a sequence that has at most about 1 nucleotide, at most about 2, at most about 3, at most about 4, at most about 5, at most about 10, at most about 100, at most about 1000, at most about 10000, at most about 100000, or at most about 1000000 nucleotide differences relative to SEQ ID NO: 18. The bacterial strain described herein can comprise a sequence having a sequence identity that is 100% to SEQ ID NO: 18.

[0187] The bacterial strain described herein can comprise a sequence having a sequence identity that is at least about 80%, at least about 85%, at least about 90%, at least about 91%, at least about 92%, at least about 93%, at least about 94%, at least about 95%, at least about 96%, at least about 97%, at least about 98%, at least about 99%, at least about 99.9%, at least about 99.99%, at least about 99.999%, at least about 99.9999%, at least about 99.99999% or more to SEQ ID NO: 20. The bacterial strain described herein can comprise a sequence having a sequence identity that is at most about 80%, at most about 85%, at most about 90%, at most about 91%, at most about 92%, at most about 93%, at most about 94%, at most about 95%, at most about 96%, at most about 97%, at most about 98%, at most about 99%, at most about 99.9%, at most about 99.99%, at most about 99.999%, at most about 99.9999%, or at most about 99.99999% to SEQ ID NO: 20. The bacterial strain described herein can comprise a sequence that has at least about 1, at least about 2, at least about 3, at least about 4, at least about 5, at least about 10, at least about 100, at least about 1000, at least about 10000, at least about 100000, at least about 1000000 or more nucleotide differences relative to SEQ ID NO: 20. The bacterial strain described herein can comprise a sequence that has at most about 1 nucleotide, at most about 2, at most about 3, at most about 4, at most about 5, at most about 10, at most about 100, at most about 1000, at most about 10000, at most about 100000, or at most about 1000000 nucleotide differences relative to SEQ ID NO: 20. The bacterial strain described herein can comprise a sequence having a sequence identity that is 100% to SEQ ID NO: 20.

[0188] The bacterial strain described herein can comprise a sequence having a sequence identity that is at least about 80%, at least about 85%, at least about 90%, at least about 91%, at least about 92%, at least about 93%, at least about 94%, at least about 95%, at least about 96%, at least about 97%, at least about 98%, at least about 99%, at least about 99.9%, at least about 99.99%, at least about 99.999%, at least about 99.9999%, at least about 99.99999% or more to SEQ ID NO: 21. The bacterial strain described herein can comprise a sequence having a sequence identity that is at most about 80%, at most about 85%, at most about 90%, at most about 91%, at most about 92%, at most about 93%, at most about 94%, at most about 95%, at most about 96%, at most about 97%, at most about 98%, at most about 99%, at most about 99.9%, at most about 99.99%, at most about 99.999%, at most about 99.9999%, or at most about 99.99999% to SEQ ID NO: 21. The bacterial strain described herein can comprise a sequence that has at least about 1, at least about 2, at least about 3, at least about 4, at least about 5, at least about 10, at least about 100, at least about 1000, at least about 10000, at least about 100000, at least about 1000000 or more nucleotide differences relative to SEQ ID NO: 21. The bacterial strain described herein can comprise a sequence that has at most about 1 nucleotide, at most about 2, at most about 3, at most about 4, at most about 5, at most about 10, at most about 100, at most about 1000, at most about 10000, at most about 100000, or at most about 1000000 nucleotide differences relative to SEQ ID NO: 21. The bacterial strain described herein can comprise a sequence having a sequence identity that is 100% to SEQ ID NO: 21.

[0189] The bacterial strain described herein can comprise a sequence having a sequence identity that is at least about 80%, at least about 85%, at least about 90%, at least about 91%, at least about 92%, at least about 93%, at least about 94%, at least about 95%, at least about 96%, at least about 97%, at least about 98%, at least about 99%, at least about 99.9%, at least about 99.99%, at least about 99.999%, at least about 99.9999%, at least about 99.99999% or more to SEQ ID NO: 22. The bacterial strain described herein can comprise a sequence having a sequence identity that is at most about 80%, at most about 85%, at most about 90%, at most about 91%, at most about 92%, at most about 93%, at most about 94%, at most about 95%, at most about 96%, at most about 97%, at most about 98%, at most about 99%, at most about 99.9%, at most about 99.99%, at most about 99.999%, at most about 99.9999%, or at most about 99.99999% to SEQ ID NO: 22. The bacterial strain described herein can comprise a sequence that has at least about 1, at least about 2, at least about 3, at least about 4, at least about 5, at least about 10, at least about 100, at least about 1000, at least about 10000, at least about 100000, at least about 1000000 or more nucleotide differences relative to SEQ ID NO: 22. The bacterial strain described herein can comprise a sequence that has at most about 1 nucleotide, at most about 2, at most about 3, at most about 4, at most about 5, at most about 10, at most about 100, at most about 1000, at most about 10000, at most about 100000, or at most about 1000000 nucleotide differences relative to SEQ ID NO: 22. The bacterial strain described herein can comprise a sequence having a sequence identity that is 100% to SEQ ID NO: 22.

[0190] The bacterial strain described herein can comprise a sequence having a sequence identity that is at least about 80%, at least about 85%, at least about 90%, at least about 91%, at least about 92%, at least about 93%, at least about 94%, at least about 95%, at least about 96%, at least about 97%, at least about 98%, at least about 99%, at least about 99.9%, at least about 99.99%, at least about 99.999%, at least about 99.9999%, at least about 99.99999% or more to SEQ ID NO: 23. The bacterial strain described herein can comprise a sequence having a sequence identity that is at most about 80%, at most about 85%, at most about 90%, at most about 91%, at most about 92%, at most about 93%, at most about 94%, at most about 95%, at most about 96%, at most about 97%, at most about 98%, at most about 99%, at most about 99.9%, at most about 99.99%, at most about 99.999%, at most about 99.9999%, or at most about 99.99999% to SEQ ID NO: 23. The bacterial strain described herein can comprise a sequence that has at least about 1, at least about 2, at least about 3, at least about 4, at least about 5, at least about 10, at least about 100, at least about 1000, at least about 10000, at least about 100000, at least about 1000000 or more nucleotide differences relative to SEQ ID NO: 23. The bacterial strain described herein can comprise a sequence that has at most about 1 nucleotide, at most about 2, at most about 3, at most about 4, at most about 5, at most about 10, at most about 100, at most about 1000, at most about 10000, at most about 100000, or at most about 1000000 nucleotide differences relative to SEQ ID NO: 23. The bacterial strain described herein can comprise a sequence having a sequence identity that is 100% to SEQ ID NO: 23.

[0191] The bacterial strain described herein can comprise a sequence having a sequence identity that is at least about 80%, at least about 85%, at least about 90%, at least about 91%, at least about 92%, at least about 93%, at least about 94%, at least about 95%, at least about 96%, at least about 97%, at least about 98%, at least about 99%, at least about 99.9%, at least about 99.99%, at least about 99.999%, at least about 99.9999%, at least about 99.99999% or more to SEQ ID NO: 24. The bacterial strain described herein can comprise a sequence having a sequence identity that is at most about 80%, at most about 85%, at most about 90%, at most about 91%, at most about 92%, at most about 93%, at most about 94%, at most about 95%, at most about 96%, at most about 97%, at most about 98%, at most about 99%, at most about 99.9%, at most about 99.99%, at most about 99.999%, at most about 99.9999%, or at most about 99.99999% to SEQ ID NO: 24. The bacterial strain described herein can comprise a sequence that has at least about 1, at least about 2, at least about 3, at least about 4, at least about 5, at least about 10, at least about 100, at least about 1000, at least about 10000, at least about 100000, at least about 1000000 or more nucleotide differences relative to SEQ ID NO: 24. The bacterial strain described herein can comprise a sequence that has at most about 1 nucleotide, at most about 2, at most about 3, at most about 4, at most about 5, at most about 10, at most about 100, at most about 1000, at most about 10000, at most about 100000, or at most about 1000000 nucleotide differences relative to SEQ ID NO: 24. The bacterial strain described herein can comprise a sequence having a sequence identity that is 100% to SEQ ID NO: 24.

[0192] The bacterial strain described herein can comprise a sequence having a sequence identity that is at least about 80%, at least about 85%, at least about 90%, at least about 91%, at least about 92%, at least about 93%, at least about 94%, at least about 95%, at least about 96%, at least about 97%, at least about 98%, at least about 99%, at least about 99.9%, at least about 99.99%, at least about 99.999%, at least about 99.9999%, at least about 99.99999% or more to SEQ ID NO: 25. The bacterial strain described herein can comprise a sequence having a sequence identity that is at most about 80%, at most about 85%, at most about 90%, at most about 91%, at most about 92%, at most about 93%, at most about 94%, at most about 95%, at most about 96%, at most about 97%, at most about 98%, at most about 99%, at most about 99.9%, at most about 99.99%, at most about 99.999%, at most about 99.9999%, or at most about 99.99999% to SEQ ID NO: 25. The bacterial strain described herein can comprise a sequence that has at least about 1, at least about 2, at least about 3, at least about 4, at least about 5, at least about 10, at least about 100, at least about 1000, at least about 10000, at least about 100000, at least about 1000000 or more nucleotide differences relative to SEQ ID NO: 25. The bacterial strain described herein can comprise a sequence that has at most about 1 nucleotide, at most about 2, at most about 3, at most about 4, at most about 5, at most about 10, at most about 100, at most about 1000, at most about 10000, at most about 100000, or at most about 1000000 nucleotide differences relative to SEQ ID NO: 25. The bacterial strain described herein can comprise a sequence having a sequence identity that is 100% to SEQ ID NO: 25.

[0193] The bacterial strain described herein can comprise a sequence having a sequence identity that is at least about 80%, at least about 85%, at least about 90%, at least about 91%, at least about 92%, at least about 93%, at least about 94%, at least about 95%, at least about 96%, at least about 97%, at least about 98%, at least about 99%, at least about 99.9%, at least about 99.99%, at least about 99.999%, at least about 99.9999%, at least about 99.99999% or more to SEQ ID NO: 26. The bacterial strain described herein can comprise a sequence having a sequence identity that is at most about 80%, at most about 85%, at most about 90%, at most about 91%, at most about 92%, at most about 93%, at most about 94%, at most about 95%, at most about 96%, at most about 97%, at most about 98%, at most about 99%, at most about 99.9%, at most about 99.99%, at most about 99.999%, at most about 99.9999%, or at most about 99.99999% to SEQ ID NO: 26. The bacterial strain described herein can comprise a sequence that has at least about 1, at least about 2, at least about 3, at least about 4, at least about 5, at least about 10, at least about 100, at least about 1000, at least about 10000, at least about 100000, at least about 1000000 or more nucleotide differences relative to SEQ ID NO: 26. The bacterial strain described herein can comprise a sequence that has at most about 1 nucleotide, at most about 2, at most about 3, at most about 4, at most about 5, at most about 10, at most about 100, at most about 1000, at most about 10000, at most about 100000, or at most about 1000000 nucleotide differences relative to SEQ ID NO: 26. The bacterial strain described herein can comprise a sequence having a sequence identity that is 100% to SEQ ID NO: 26.

[0194] The bacterial strain described herein can comprise a sequence having a sequence identity that is at least about 80%, at least about 85%, at least about 90%, at least about 91%, at least about 92%, at least about 93%, at least about 94%, at least about 95%, at least about 96%, at least about 97%, at least about 98%, at least about 99%, at least about 99.9%, at least about 99.99%, at least about 99.999%, at least about 99.9999%, at least about 99.99999% or more to SEQ ID NO: 27. The bacterial strain described herein can comprise a sequence having a sequence identity that is at most about 80%, at most about 85%, at most about 90%, at most about 91%, at most about 92%, at most about 93%, at most about 94%, at most about 95%, at most about 96%, at most about 97%, at most about 98%, at most about 99%, at most about 99.9%, at most about 99.99%, at most about 99.999%, at most about 99.9999%, or at most about 99.99999% to SEQ ID NO: 27. The bacterial strain described herein can comprise a sequence that has at least about 1, at least about 2, at least about 3, at least about 4, at least about 5, at least about 10, at least about 100, at least about 1000, at least about 10000, at least about 100000, at least about 1000000 or more nucleotide differences relative to SEQ ID NO: 27. The bacterial strain described herein can comprise a sequence that has at most about 1 nucleotide, at most about 2, at most about 3, at most about 4, at most about 5, at most about 10, at most about 100, at most about 1000, at most about 10000, at most about 100000, or at most about 1000000 nucleotide differences relative to SEQ ID NO: 27. The bacterial strain described herein can comprise a sequence having a sequence identity that is 100% to SEQ ID NO: 27.

[0195] The bacterial strain described herein can comprise a sequence having a sequence identity that is at least about 80%, at least about 85%, at least about 90%, at least about 91%, at least about 92%, at least about 93%, at least about 94%, at least about 95%, at least about 96%, at least about 97%, at least about 98%, at least about 99%, at least about 99.9%, at least about 99.99%, at least about 99.999%, at least about 99.9999%, at least about 99.99999% or more to SEQ ID NO: 28. The bacterial strain described herein can comprise a sequence having a sequence identity that is at most about 80%, at most about 85%, at most about 90%, at most about 91%, at most about 92%, at most about 93%, at most about 94%, at most about 95%, at most about 96%, at most about 97%, at most about 98%, at most about 99%, at most about 99.9%, at most about 99.99%, at most about 99.999%, at most about 99.9999%, or at most about 99.99999% to SEQ ID NO: 28. The bacterial strain described herein can comprise a sequence that has at least about 1, at least about 2, at least about 3, at least about 4, at least about 5, at least about 10, at least about 100, at least about 1000, at least about 10000, at least about 100000, at least about 1000000 or more nucleotide differences relative to SEQ ID NO: 28. The bacterial strain described herein can comprise a sequence that has at most about 1 nucleotide, at most about 2, at most about 3, at most about 4, at most about 5, at most about 10, at most about 100, at most about 1000, at most about 10000, at most about 100000, or at most about 1000000 nucleotide differences relative to SEQ ID NO: 28. The bacterial strain described herein can comprise a sequence having a sequence identity that is 100% to SEQ ID NO: 28.

[0196] The bacterial strain described herein can comprise a sequence having a sequence identity that is at least about 80%, at least about 85%, at least about 90%, at least about 91%, at least about 92%, at least about 93%, at least about 94%, at least about 95%, at least about 96%, at least about 97%, at least about 98%, at least about 99%, at least about 99.9%, at least about 99.99%, at least about 99.999%, at least about 99.9999%, at least about 99.99999% or more to SEQ ID NO: 29. The bacterial strain described herein can comprise a sequence having a sequence identity that is at most about 80%, at most about 85%, at most about 90%, at most about 91%, at most about 92%, at most about 93%, at most about 94%, at most about 95%, at most about 96%, at most about 97%, at most about 98%, at most about 99%, at most about 99.9%, at most about 99.99%, at most about 99.999%, at most about 99.9999%, or at most about 99.99999% to SEQ ID NO: 29. The bacterial strain described herein can comprise a sequence that has at least about 1, at least about 2, at least about 3, at least about 4, at least about 5, at least about 10, at least about 100, at least about 1000, at least about 10000, at least about 100000, at least about 1000000 or more nucleotide differences relative to SEQ ID NO: 29. The bacterial strain described herein can comprise a sequence that has at most about 1 nucleotide, at most about 2, at most about 3, at most about 4, at most about 5, at most about 10, at most about 100, at most about 1000, at most about 10000, at most about 100000, or at most about 1000000 nucleotide differences relative to SEQ ID NO: 29. The bacterial strain described herein can comprise a sequence having a sequence identity that is 100% to SEQ ID NO: 29.

[0197] The bacterial strain described herein can comprise a sequence having a sequence identity that is at least about 80%, at least about 85%, at least about 90%, at least about 91%, at least about 92%, at least about 93%, at least about 94%, at least about 95%, at least about 96%, at least about 97%, at least about 98%, at least about 99%, at least about 99.9%, at least about 99.99%, at least about 99.999%, at least about 99.9999%, at least about 99.99999% or more to SEQ ID NO: 30. The bacterial strain described herein can comprise a sequence having a sequence identity that is at most about 80%, at most about 85%, at most about 90%, at most about 91%, at most about 92%, at most about 93%, at most about 94%, at most about 95%, at most about 96%, at most about 97%, at most about 98%, at most about 99%, at most about 99.9%, at most about 99.99%, at most about 99.999%, at most about 99.9999%, or at most about 99.99999% to SEQ ID NO: 30. The bacterial strain described herein can comprise a sequence that has at least about 1, at least about 2, at least about 3, at least about 4, at least about 5, at least about 10, at least about 100, at least about 1000, at least about 10000, at least about 100000, at least about 1000000 or more nucleotide differences relative to SEQ ID NO: 30. The bacterial strain described herein can comprise a sequence that has at most about 1 nucleotide, at most about 2, at most about 3, at most about 4, at most about 5, at most about 10, at most about 100, at most about 1000, at most about 10000, at most about 100000, or at most about 1000000 nucleotide differences relative to SEQ ID NO: 30. The bacterial strain described herein can comprise a sequence having a sequence identity that is 100% to SEQ ID NO: 30.

[0198] Lactobacillus crispatus may have a genome that has a sequence that has a sequence identity that is about 95%-100% to any one of SEQ ID NOs: 1-4 and 12-15. Lactobacillus crispatus may have a genome that has a sequence that has a sequence identity that is about 95%-100% to any one of SEQ ID NOs: 1-2. Lactobacillus crispatus may have a genome that has a sequence that has a sequence identity that is about 95%-100% to a combination of SEQ ID NOs: 1-2. Lactobacillus crispatus may have a genome that has a sequence that has a sequence identity that is about 95%-100% to any one of SEQ ID NOs: 3-4. Lactobacillus crispatus may have a genome that has a sequence that has a sequence identity that is about 95%-100% to a combination of SEQ ID NOs: 3-4. Lactobacillus crispatus may have a genome that has a sequence that has a sequence identity that is about 95%-100% to any one of SEQ ID NOs: 12-15. Lactobacillus crispatus may have a genome that has a sequence that has a sequence identity that is about 95%-100% to a combination of SEQ ID NOs: 12-15. Lactobacillus gasseri may have a genome that has a sequence that has a sequence identity that is about 95%-100% to any one of SEQ ID NOs: 5-6. Lactobacillus gasseri may have a genome that has a sequence that has a sequence identity that is about 95%-100% to a combination of SEQ ID NOs: 5-6. Lactobacillus jensenii may have a genome that has a sequence that has a sequence identity that is about 95%-100% to SEQ ID NO: 7. Bifidobacterium bifidum may have a genome that has a sequence that has a sequence identity that is about 95%-100% to any one of SEQ ID NOs: 8-9. Bifidobacterium bifidum may have a genome that has a sequence that has a sequence identity that is about 95%-100% to SEQ ID NO: 8. Bifidobacterium bifidum may have a genome that has a sequence that has a sequence identity that is about 95%-100% to SEQ ID NO: 9. Lactobacillus plantarum may have a genome that has a sequence that has a sequence identity that is about 95%-100% to any one of SEQ ID NOs: 10-11. Lactobacillus plantarum may have a genome that has a sequence that has a sequence identity that is about 95%-100% to a combination of SEQ ID NOs: 10-11. Bifidobacterium adolescentis may have a genome that has a sequence that has a sequence identity that is about 95%-100% to SEQ ID NO: 16. Bifidobacterium breve may have a genome that has a sequence that has a sequence identity that is about 95%-100% to any one of SEQ ID NOs: 17 and 30. Bifidobacterium breve may have a genome that has a sequence that has a sequence identity that is about 95%-100% to SEQ ID NO: 17. Bifidobacterium breve may have a genome that has a sequence that has a sequence identity that is about 95%-100% to SEQ ID NO: 30. Bifidobacterium longum may have a genome that has a sequence that has a sequence identity that is about 95%-100% to any one of SEQ ID NOs: 18-26. Bifidobacterium longum may have a genome that has a sequence that has a sequence identity that is about 95%-100% to any one of SEQ ID NOs: 18-19. Bifidobacterium longum may have a genome that has a sequence that has a sequence identity that is about 95%-100% to a combination of SEQ ID NOs: 18-19. Bifidobacterium longum may have a genome that has a sequence that has a sequence identity that is about 95%-100% to SEQ ID NO: 20. Bifidobacterium longum may have a genome that has a sequence that has a sequence identity that is about 95%-100% to any one of SEQ ID NOs: 21-24. Bifidobacterium longum may have a genome that has a sequence that has a sequence identity that is about 95%-100% to a combination of SEQ ID NOs: 21-24. Bifidobacterium longum may have a genome that has a sequence that has a sequence identity that is about 95%-100% to any one of SEQ ID NOs: 25-26. Bifidobacterium longum may have a genome that has a sequence that has a sequence identity that is about 95%-100% to a combination of SEQ ID NOs: 25-26. Bifidobacterium pseudocatenulatum may have a genome that has a sequence that has a sequence identity that is about 95%-100% to any one of SEQ ID NOs: 27-28. Bifidobacterium pseudocatenulatum may have a genome that has a sequence that has a sequence identity that is about 95%-100% to SEQ ID NO: 27. Bifidobacterium pseudocatenulatum may have a genome that has a sequence that has a sequence identity that is about 95%-100% to SEQ ID NO: 28. Lactobacillus rhamnosus may have a genome that has a sequence that has a sequence identity that is about 95%-100% to SEQ ID NO: 29.

[0199] Bifidobacterium bifidum ST31 (or “ST31”) may have a genome sequence that has a sequence identity that is about 100% to SEQ ID NO: 8. Bifidobacterium bifidum ST80 (or “ST80”) may have a genome sequence that has a sequence identity that is about 100% to SEQ ID NO: 9. Lactobacillus crispatus ST100 (or “ST100”) may have a genome sequence that has a sequence identity that is about 100% to a combination of SEQ ID NOs: 12-15. Lactobacillus crispatus ST20 (or “ST20”) may have a genome sequence that has a sequence identity that is about 100% to a combination of SEQ ID NOs: 1-2. Lactobacillus crispatus ST112 (or “ST112”) may have a genome sequence that has a sequence identity that is about 100% to a combination of SEQ ID NO: 3-4. Lactobacillus gasseri ST105 (or “ST105”) may have a genome sequence that has a sequence identity that is about 100% to a combination of SEQ ID NO: 5-6. Lactobacillus jensenii ST21 (or “ST21”) may have a genome sequence that has a sequence identity that is about 100% to SEQ ID NO: 7. Lactobacillus plantarum ST65 (or “ST65”) may have a genome sequence that has a sequence identity that is about 100% to a combination of SEQ ID NOs: 10-11. Bifidobacterium adolescentis ST101 (or “ST101”) may have a genome sequence that has a sequence identity that is about 100% to SEQ ID NO: 16. Bifidobacterium breve ST56 (or “ST56”) may have a genome sequence that has a sequence identity that is about 100% to SEQ ID NO: 17. Bifidobacterium longum ST19 (or “ST19”) may have a genome sequence that has a sequence identity that is about 100% to a combination of SEQ ID NOs: 18-19. Bifidobacterium longum ST81 (or “ST81”) may have a genome sequence that has a sequence identity that is about 100% to a combination of SEQ ID NOs: 21-24. Bifidobacterium pseudocatenulatum ST37 (or “ST37”) may have a genome sequence that has a sequence identity that is about 100% to SEQ ID NO: 27. Bifidobacterium pseudocatenulatum ST66 (or “ST66”) may have a genome sequence that has a sequence identity that is about 100% to SEQ ID NO: 28. Lactobacillus rhamnosus ST116 (or “ST116”) may have a genome sequence that has a sequence identity that is about 100% to SEQ ID NO: 29. Bifidobacterium longum ST23 (or “ST23”) may have a genome sequence that has a sequence identity that is about 100% to SEQ ID NO: 20. Bifidobacterium longum ST119 (or “ST119”) may have a genome sequence that has a sequence identity that is about 100% to a combination of SEQ ID NOs: 25-26. Bifidobacterium breve ST71 (or “ST71”) may have a genome sequence that has a sequence identity that is about 100% to SEQ ID NO: 30.

### Sufficient Abilities

[0200] In some instances, the bacterial strain (or the cultured medium thereof; or a bacterial product encompassed within that cultured medium) can have a sufficient ability in a disease associated functions. A disease-associated function may comprise a function of a bacterial strain or bacterial population that is related to a disease or disease condition as described herein. The disease associated function may be related to a complication associated with the disease or disease condition. The disease-associated function may comprise an alteration of the cellular process of the subject or the pathogen associated with the disease or disease condition. The disease-associated function may comprise an alteration of the cellular process of the bacterial strain or bacterial population as described herein. A sufficient ability, as used herein, when referring to a bacterial strain (or the cultured medium thereof; or a bacterial product encompassed within that cultured medium), refers to an ability of the bacterial strain (or the cultured medium thereof; or a bacterial product encompassed within that cultured medium) to alter the disease-associated function. The sufficient ability of a bacterial strain (or a bacterial population) can be mediated by a bacterial product generated by the bacterial strain. The bacterial product may be present within a medium used to culture the bacterial strain. The sufficient ability of a bacterial strain (or a bacterial population) can be mediated by the metabolic ability of a bacterial strain as described herein. The metabolic ability can convert a a substance of a nutrient source to a different substance.

[0201] A vaginal disease-associated function may comprise any BV-specific MOAs and functionalities described in this disclosure. In some cases, a vaginal disease-associated function may comprise an adherence to a vaginal epithelial cell (VEC), an inhibition of growth of a vaginal pathogen, an inhibition of a biofilm formation of a vaginal pathogen, a utilization of a vaginally relevant carbohydrate, a growth in a vaginal pH, or a combination thereof. A vaginal disease-associated function may comprise an adherence to a VEC. A vaginal disease-associated function may comprise an inhibition of growth of a vaginal pathogen. A vaginal disease-associated function may comprise an inhibition of a biofilm formation of a vaginal pathogen. A vaginal disease-associated function may comprise a utilization of a vaginally relevant carbohydrate. In some cases, a vaginal disease-associated function may comprise in a growth in a vaginal pH. In some cases, a vaginal disease-associated function may comprise an adherence to a VEC, an inhibition of growth of a vaginal pathogen, an inhibition of a biofilm formation of a vaginal pathogen, a growth in a vaginal pH, and a utilization of a vaginally relevant carbohydrate.

[0202] In some instances, the bacterial strain can have a sufficient ability in an infant gastrointestinal disease-associated function. The infant gastrointestinal disease-associated function may comprise any NEC-specific MOAs and functionalities described in this disclosure. In some cases, an infant gastrointestinal disease-associated function may comprise an adherence to an intestinal epithelial cell (IEC), an integrity of a barrier comprising IEC, an inhibition of an infant gastrointestinal pathogen, a utilization of an infant-relevant carbohydrate, an inhibition of an immune response signaling pathway, or a combination thereof. As used herein, an infant gastrointestinal pathogen comprises a microorganism that: (1) causes an infant gastrointestinal disease; (2) associated with an infant gastrointestinal; and/or (3) contributes to the symptoms of the infant gastrointestinal disease. In some instances, inhibiting or eliminating an infant gastrointestinal pathogen can treat or prevent the infant gastrointestinal disease or alleviate the symptoms of the infant gastrointestinal disease. In some cases, an infant gastrointestinal disease-associated function may comprise an adherence to an IEC. In some cases, an infant gastrointestinal disease-associated function may comprise an integrity of a barrier comprising IEC. In some cases, an infant gastrointestinal disease-associated function may comprise an inhibition of an infant gastrointestinal pathogen. In some cases, an infant gastrointestinal disease-associated function may comprise a utilization of an infant-relevant carbohydrate. In some cases, an infant gastrointestinal disease-associated function may comprise an inhibition of an immune response signaling pathway. In some instances, the bacterial strain can have a sufficient ability in a NEC-associated function. In some cases, an infant gastrointestinal disease-associated function may comprise an adherence to an intestinal epithelial cell (IES), an integrity of a barrier comprising IEC, an inhibition of an infant gastrointestinal pathogen, a utilization of an infant-relevant carbohydrate, and an inhibition of an immune response signaling pathway.

### 1. BV-Associated Functions

[0203] A bacterial strain described herein (or the cultured medium thereof; or a bacterial product encompassed within that cultured medium) may have a sufficient ability in the adherence to a VEC. In some cases, the bacterial strain may exhibit an adherence to the VEC by at least about 1×10\hat{ }1 CFU per 9.5 cm\hat{ }2 of VEC, at least about 2×10\hat{ }1 CFU per 9.5 cm\hat{ }2 of VEC, at least about 5×10\hat{ }1 CFU per 9.5 cm\hat{ }2 of VEC, at least about 1×10\hat{ }2 CFU per 9.5 cm\hat{ }2 of VEC, at least about 2×10\hat{ }2 CFU per 9.5 cm\hat{ }2 of VEC, at least about 5×10\hat{ }2 CFU per 9.5 cm\hat{ }2 of VEC, at least about 1×10\hat{ }3 CFU per 9.5 cm\hat{ }2 of VEC, at least about 2×10\hat{ }3 CFU per 9.5 cm\hat{ }2 of VEC, at least about 5×10\hat{ }3 CFU per 9.5 cm\hat{ }2 of VEC, at least about 1×10\hat{ }4 CFU per 9.5 cm\hat{ }2 of VEC, at least about 2×10\hat{ }4 CFU per 9.5 cm\hat{ }2 of VEC, at least about 5×10\hat{ }4 CFU per 9.5 cm\hat{ }2 of VEC, at least about 1×10\hat{ }5 CFU per 9.5 cm\hat{ }2 of VEC, at least about 2×10\hat{ }5 CFU per 9.5 cm\hat{ }2 of VEC, at least about 5×10\hat{ }5 CFU per 9.5 cm\hat{ }2 of VEC, at least about 1×10\hat{ }6 CFU per 9.5 cm\hat{ }2 of VEC, at least about 2×10\hat{ }6 CFU per 9.5 cm\hat{ }2 of VEC, at least about 5×10\hat{ }6 CFU per 9.5 cm\hat{ }2 of VEC, at least about 1×10\hat{ }7 CFU per 9.5 cm\hat{ }2 of VEC, at least about 2×10\hat{ }7 CFU per 9.5 cm\hat{ }2 of VEC, at least about 5×10\hat{ }7 CFU per 9.5 cm\hat{ }2 of VEC, at least about 1×10\hat{ }8 CFU per 9.5 cm\hat{ }2 of VEC, at least about 2×10\hat{ }8 CFU per 9.5 cm\hat{ }2 of VEC, at least about 5×10\hat{ }8 CFU per 9.5 cm\hat{ }2 of VEC, at least about 1×10\hat{ }9 CFU per 9.5 cm\hat{ }2 of VEC, at least about 2×10\hat{ }9 CFU per 9.5 cm\hat{ }2 of VEC, at least about 5×10\hat{ }9 CFU per 9.5 cm\hat{ }2 of VEC, at least about 1×10\hat{ }10 CFU per 9.5 cm\hat{ }2 of VEC, at least about 2×10\hat{ }10 CFU per 9.5 cm\hat{ }2 of VEC, at least about 5×10\hat{ }10 CFU per 9.5 cm\hat{ }2 of VEC, at least about 1×10\hat{ }11 CFU per 9.5 cm\hat{ }2 of VEC, at least about 2×10\hat{ }11 CFU per 9.5 cm\hat{ }2 of VEC, at least about 5×10\hat{ }11 CFU per 9.5 cm\hat{ }2 of VEC, at least about 1×10\hat{ }12 CFU per 9.5 cm\hat{ }2 of VEC, at least about 2×10\hat{ }12 CFU per 9.5 cm\hat{ }2 of VEC, at least about 5×10\hat{ }12 CFU per 9.5 cm\hat{ }2 of VEC or more. In some cases, the bacterial strain (or the cultured medium thereof; or a bacterial product encompassed within that cultured medium) may exhibit an adherence to the VEC by at most about 1×10\hat{ }1 CFU per 9.5 cm\hat{ }2 of VEC, at most about 2×10\hat{ }1 CFU per 9.5 cm\hat{ }2 of VEC, at most about 5×10\hat{ }1 CFU per 9.5 cm\hat{ }2 of VEC, at most about 1×10\hat{ }2 CFU per 9.5 cm\hat{ }2 of VEC, at most about 2×10\hat{ }2 CFU per 9.5 cm\hat{ }2 of VEC, at most about 5×10\hat{ }2 CFU per 9.5 cm\hat{ }2 of VEC, at most about 1×10\hat{ }3 CFU per 9.5 cm\hat{ }2 of VEC, at most about 2×10\hat{ }3 CFU per 9.5 cm\hat{ }2 of VEC, at most about 5×10\hat{ }3 CFU per 9.5 cm\hat{ }2 of VEC, at most about 1×10\hat{ }4 CFU per 9.5 cm\hat{ }2 of VEC, at most about 2×10\hat{ }4 CFU per 9.5 cm\hat{ }2 of VEC, at most about 5×10\hat{ }4 CFU per 9.5 cm\hat{ }2 of VEC, at most about 1×10\hat{ }5 CFU per 9.5 cm\hat{ }2 of VEC, at most about 2×10\hat{ }5 CFU per 9.5 cm\hat{ }2 of VEC, at most about 5×10\hat{ }5 CFU per 9.5 cm\hat{ }2 of VEC, at most about 1×10\hat{ }6 CFU per 9.5 cm\hat{ }2 of VEC, at most about 2×10\hat{ }6 CFU per 9.5 cm\hat{ }2 of VEC, at most about 5×10\hat{ }6 CFU per 9.5 cm\hat{ }2 of VEC, at most about 1×10\hat{ }7 CFU per 9.5 cm\hat{ }2 of VEC, at most about 2×10\hat{ }7 CFU per 9.5 cm\hat{ }2 of VEC, at most about 5×10\hat{ }7 CFU per 9.5 cm\hat{ }2 of VEC, at most about 1×10\hat{ }8 CFU per 9.5 cm\hat{ }2 of VEC, at most about 2×10\hat{ }8 CFU per 9.5 cm\hat{ }2 of VEC, at most about 5×10\hat{ }8 CFU per 9.5 cm\hat{ }2 of VEC, at most about 1×10\hat{ }9 CFU per 9.5 cm\hat{ }2 of VEC, at most about 2×10\hat{ }9 CFU per 9.5 cm\hat{ }2 of VEC, at most about 5×10\hat{ }9 CFU per 9.5 cm\hat{ }2 of VEC, at most about 1×10\hat{ }10 CFU per 9.5 cm\hat{ }2 of VEC, at most about 2×10\hat{ }10 CFU per 9.5 cm\hat{ }2 of VEC, at most about 5×10\hat{ }10 CFU per 9.5 cm\hat{ }2 of VEC, at most about 1×10\hat{ }11 CFU per 9.5 cm\hat{ }2 of VEC, at most about 2×10\hat{ }11 CFU per 9.5 cm\hat{ }2 of VEC, at most about 5×10\hat{ }11 CFU per 9.5 cm\hat{ }2 of VEC, at most about 1×10\hat{ }12 CFU per 9.5 cm\hat{ }2 of VEC, at most about 2×10\hat{ }12 CFU per 9.5 cm\hat{ }2 of VEC, or at most about 5×10\hat{ }12 CFU per 9.5 cm\hat{ }2 of VEC. In some cases, the bacterial strain described herein may have an adherence to a VEC that is at least about 0.001%, at least about 0.001%, at least about 0.01%, at least about 0.1%, at least about 1%, at least about 2%, at least about 3%, at least about 4%, at least about 5%, at least about 6%, at least about 7%, at least about 8%, at least about 9%, at least about 10%, at least about 20%, at least about 30%, at least about 40%, at least about 50%, at least about 60%, at least about 70%, at least about 80%, at least about 90%, at least about 100%, at least about 150%, at least about 2-fold, at least about 3-fold, at least about 4-fold, at least about 5-fold, at least about 6-fold, at least about 7-fold, at least about 8-fold, at least about 9-fold, at least about 10-fold, at least about 100-fold, at least about 1000-fold, at least about 10000-fold, at least about 100000-fold, or at least about 1000000-fold higher than that of a control strain. In some cases, the bacterial strain described herein may have an adherence to a VEC that is at most about 0.001%, at most about 0.001%, at most about 0.01%, at most about 0.1%, at most about 1%, at most about 2%, at most about 3%, at most about 4%, at most about 5%, at most about 6%, at most about 7%, at most about 8%, at most about 9%, at most about 10%, at most about 20%, at most about 30%, at most about 40%, at most about 50%, at most about 60%, at most about 70%, at most about 80%, at most about 90%, at most about 100%, at most about 150%, at most about 2-fold, at most about 3-fold, at most about 4-fold, at most about 5-fold, at most about 6-fold, at most about 7-fold, at most about 8-fold, at most about 9-fold, at most about 10-fold, at most about 100-fold, at most about 1000-fold, at most about 10000-fold, at most about 100000-fold, or at most about 1000000-fold higher than that of a control strain. The control strain may comprise LP01 (described in Luigi et al., Acta Biomed. 2019; 90(Suppl 7): 13-17; which is herein incorporated by reference in its entirety); LBV96 (described in U.S. Pat. No. 8,846,027 and Marschalek et al., Breast Care (Basel). 2017 October; 12(5):335-339; which is herein incorporated by reference in its entirety); LBV88 (described in U.S. Pat. No. 8,846,027 and Marschalek et al.); or LBV116 (described in U.S. Pat. No. 8,846,027 and Marschalek et al.). The adherence to the VEC can be measured by contacting a population of a bacterial strains to a VEC and measuring the number of the bacteria cells attached or adhered to the VEC. For example, the adherence to the VEC can be measured by the methods described herein, such as those described in EXAMPLE 2. In some cases, a bacterial strain described herein (or the cultured medium thereof; or a bacterial product encompassed within that cultured medium) may not have a sufficient ability in the adherence to a VEC

[0204] A bacterial strain described herein (or the cultured medium thereof; or a bacterial product encompassed within that cultured medium) may have a sufficient ability in inhibiting a growth or biofilm formation of a vaginal pathogen. The vaginal pathogen may comprise G. vaginalis, L. iners, Prevotella bivia, Atopobium vaginae, Sneathia spp., or a combination thereof. The vaginal pathogen may comprise G. vaginalis. The vaginal pathogen may comprise L. iners. The vaginal pathogen may comprise Prevotella bivia. The vaginal pathogen may comprise Atopobium vaginae. The vaginal pathogen may comprise Sneathia spp. The vaginal pathogen may comprise Prevotella bivia, Atopobium vaginae, Sneathia spp., G. vaginalis, and L. iners. In some cases, a bacterial strain described herein (or the cultured medium thereof; or a bacterial product encompassed within that cultured medium) may not have a sufficient ability in inhibiting a growth or biofilm formation of a vaginal pathogen.

[0205] In some cases, the bacterial strain (or the cultured medium thereof; or a bacterial product encompassed within that cultured medium) may inhibit the growth of a vaginal pathogen by at least about 1%, at least about 2%, at least about 3%, at least about 4%, at least about 5%, at least about 10%, at least about 15%, at least about 20%, at least about 25%, at least about 30%, at least about 35%, at least about 40%, at least about 45%, at least about 50%, at least about 55%, at least about 60%, at least about 65%, at least about 70%, at least about 75%, at least about 80%, at least about 85%, at least about 90%, at least about 95%, or at least about 100%, relative to a growth of the pathogen when inhibited by a control. The control may comprise growing the vaginal pathogen with a media control or without the bacterial strain (such as those described in EXAMPLE 2). The control may comprise growing the vaginal pathogen without the bacterial strain. In some cases, the bacterial strain (or the cultured medium thereof; or a bacterial product encompassed within that cultured medium) may inhibit the growth of a vaginal pathogen by at most about 1%, at most about 2%, at most about 3%, at most about 4%, at most about 5%, at most about 10%, at most about 15%, at most about 20%, at most about 25%, at most about 30%, at most about 35%, at most about 40%, at most about 45%, at most about 50%, at most about 55%, at most about 60%, at most about 65%, at most about 70%, at most about 75%, at most about 80%, at most about 85%, at most about 90%, at most about 95%, or at most about 100%, relative to a growth of the pathogen when inhibited by the control.

[0206] In some cases, the bacterial strain described herein (or the cultured medium thereof; or a bacterial product encompassed within that cultured medium) may exhibit an inhibition of the growth of a vaginal pathogen that is at least about 0.001%, at least about 0.001%, at least about 0.01%, at least about 0.1%, at least about 1%, at least about 2%, at least about 3%, at least about 4%, at least about 5%, at least about 6%, at least about 7%, at least about 8%, at least about 9%, at least about 10%, at least about 20%, at least about 30%, at least about 40%, at least about 50%, at least about 60%, at least about 70%, at least about 80%, at least about 90%, at least about 100%, at least about 150%, at least about 2-fold, at least about 3-fold, at least about 4-fold, at least about 5-fold, at least about 6-fold, at least about 7-fold, at least about 8-fold, at least about 9-fold, at least about 10-fold, at least about 100-fold, at least about 1000-fold, at least about 10000-fold, at least about 100000-fold, or at least about 1000000-fold higher than that of a control strain (or the cultured medium thereof; or a bacterial product encompassed within that cultured medium). In some cases, the bacterial strain described herein (or the cultured medium thereof; or a bacterial product encompassed within that cultured medium) may exhibit an inhibition of the growth of a vaginal pathogen that is at most about 0.001%, at most about 0.001%, at most about 0.010%, at most about 0.1%, at most about 1%, at most about 2%, at most about 3%, at most about 4%, at most about 5%, at most about 6%, at most about 7%, at most about 8% at most about 9%, at most about 10%, at most about 20%, at most about 30%, at most about 40%, at most about 50%, at most about 60%, at most about 70%, at most about 80%, at most about 90%, at most about 100%, at most about 150%, at most about 2-fold, at most about 3-fold, at most about 4-fold, at most about 5-fold, at most about 6-fold, at most about 7-fold, at most about 8-fold, at most about 9-fold, at most about 10-fold, at most about 100-fold, at most about 1000-fold, at most about 10000-fold, at most about 100000-fold, or at most about 1000000-fold higher than that of a control strain (or the cultured medium thereof; or a bacterial product encompassed within that cultured medium). The control strain may comprise LP01; LBV96; LBV88; or LBV116. The inhibition of the growth of the pathogen can be measured by contacting the bacterial strains (or the cultured medium thereof; or a bacterial product encompassed within that cultured medium) to the vaginal pathogen and measuring the growth of the vaginal pathogen. For example, the inhibition of the growth of the vaginal pathogen can be measured by the methods described herein, such as those described in EXAMPLE 2.

[0207] In some cases, the bacterial strain (or the cultured medium thereof; or a bacterial product encompassed within that cultured medium) may inhibit the biofilm formation of a vaginal pathogen by at least about 1%, at least about 2%, at least about 3%, at least about 4%, at least about 5%, at least about 10%, at least about 15%, at least about 20%, at least about 25%, at least about 30%, at least about 35%, at least about 40%, at least about 45%, at least about 50%, at least about 55%, at least about 60%, at least about 65%, at least about 70%, at least about 75%, at least about 80%, at least about 85%, at least about 90%, at least about 95%, or at least about 100%, relative to a biofilm formation of the pathogen when inhibited by a control. The control may comprise growing the vaginal pathogen with a media control or without the bacterial strain (such as those described in EXAMPLE 2). The control may comprise growing the vaginal pathogen without the bacterial strain. In some cases, the bacterial strain (or the cultured medium thereof; or a bacterial product encompassed within that cultured medium) may inhibit the biofilm formation of a vaginal pathogen by at most about 1%, at most about 2%, at most about 3%, at most about 4%, at most about 5%, at most about 10%, at most about 15%, at most about 20%, at most about 25%, at most about 30%, at most about 35%, at most about 40%, at most about 45%, at most about 50%, at most about 55%, at most about 60%, at most about 65%, at most about 70%, at most about 75%, at most about 80%, at most about 85%, at most about 90%, at most about 95%, or at most about 100%, relative to a biofilm formation of the pathogen when inhibited by the control.

[0208] In some cases, the bacterial strain described herein (or the cultured medium thereof; or a bacterial product encompassed within that cultured medium) may exhibit an inhibition of the biofilm formation of a vaginal pathogen that is at least about 0.001%, at least about 0.001%, at least about 0.01%, at least about 0.1%, at least about 1%, at least about 2%, at least about 3%, at least about 4%, at least about 5%, at least about 6%, at least about 7%, at least about 8%, at least about 9%, at least about 10%, at least about 20%, at least about 30%, at least about 40%, at least about 50%, at least about 60%, at least about 70%, at least about 80%, at least about 90%, at least about 100%, at least about 150%, at least about 2-fold, at least about 3-fold, at least about 4-fold, at least about 5-fold, at least about 6-fold, at least about 7-fold, at least about 8-fold, at least about 9-fold, at least about 10-fold, at least about 100-fold, at least about 1000-fold, at least about 10000-fold, at least about 100000-fold, or at least about 1000000-fold higher than that of a control strain (or the cultured medium thereof; or a bacterial product encompassed within that cultured medium). In some cases, the bacterial strain described herein (or the cultured medium thereof; or a bacterial product encompassed within that cultured medium) may exhibit an inhibition of the biofilm formation of a vaginal pathogen that is at most about 0.001%, at most about 0.001%, at most about 0.01%, at most about 0.1%, at most about 1%, at most about 2%, at most about 3%, at most about 4%, at most about 5%, at most about 6%, at most about 7%, at most about 8%, at most about 9%, at most about 10%, at most about 20%, at most about 30%, at most about 40%, at most about 50%, at most about 60%, at most about 70%, at most about 80%, at most about 90%, at most about 100%, at most about 150%, at most about 2-fold, at most about 3-fold, at most about 4-fold, at most about 5-fold, at most about 6-fold, at most about 7-fold, at most about 8-fold, at most about 9-fold, at most about 10-fold, at most about 100-fold, at most about 1000-fold, at most about 10000-fold, at most about 100000-fold, or at most about 1000000-fold higher than that of a control strain (or the cultured medium thereof; or a bacterial product encompassed within that cultured medium). The control strain may comprise LP01; LBV96; LBV88; or LBV116. The inhibition of the biofilm formation of the pathogen can be measured by contacting the bacterial strains (or the cultured medium thereof; or a bacterial product encompassed within that cultured medium) to the vaginal pathogen and measuring the biofilm formation of the vaginal pathogen. For example, the inhibition of the biofilm formation of the vaginal pathogen can be measured by the methods described herein, such as those described in EXAMPLE 2.

[0209] A bacterial strain described herein may have a sufficient ability in utilizing a vaginally relevant carbohydrate. The term “carbohydrate” as used herein when referring to a naturally occurring compound or derivative consisting of a combination of carbon, hydrogen, and oxygen molecules. The term “carbohydrate” can refer to an aldehyde or ketone with additional various hydroxyl groups including monosaccharides, disaccharides, and polysaccharides. Carbohydrates can be synthetically produced or derived from naturally occurring elements. A vaginally relevant carbohydrate can comprise a carbohydrate present in a vagina. In some cases, the vaginally relevant carbohydrate may comprise glycogen, glucose, dextrin (such as maltodextrin), maltose, mucin, sialic acid, or any combination thereof. In some cases, bacterial strain described herein may have a sufficient ability in utilizing glycogen. bacterial strain described herein may have a sufficient ability in utilizing dextrin. bacterial strain described herein may have a sufficient ability in utilizing maltodextrin. Glycogen can comprise bioglycogen. When a bacterial strain is capable of utilizing a particular nutrient substance (any substance used by an organism to survive, grow, and/or reproduce), it is also capable of converting the nutrient substance into another substance (for example via metabolic activity). For example, when a bacterial strain is capable of utilizing a particular carbohydrate, it is also capable of metabolizing the carbohydrate and/or converting the carbohydrate into a bacterial product or metabolite of that carbohydrate. In some cases, a bacterial strain capable of utilizing a particular substance is also capable of proliferating in an environment comprising that substance as a nutrient source. In some cases, a bacterial strain described herein may not have a sufficient ability in utilizing a vaginally relevant carbohydrate.

[0210] In some cases, utilization of vaginal-relevant can be measured by the growth ratio between the bacterial strain grown in a culture having a carbon source consisting of the vaginally relevant carbohydrate and the bacterial strain grown in a culture having a carbon source consisting of glucose (referred to as vaginally relevant carbohydrate growth ratio). A carbon source, as used herein, is a purified substance that acts as a source of carbon—for generating the biomass and/or energy of a microbial organism—that is added into the culture medium for culturing the microbial organism. For example, methods to determine the vaginally relevant carbohydrate growth ratio are described herein, such as those described in EXAMPLE 2.

[0211] In some cases, the bacterial strain described herein may have a vaginally relevant carbohydrate growth ratio of at least about 0.01, at least about 0.02, at least about 0.05, at least about 0.1, at least about 0.2, at least about 0.3, at least about 0.4, at least about 0.5, at least about 0.6, at least about 0.7, at least about 0.8, at least about 0.9, at least about 1, at least about 1.1, at least about 1.2, at least about 1.3, at least about 1.4, at least about 1.5, at least about 1.6, at least about 1.7, at least about 1.8, at least about 1.9, at least about 2, at least about 2.5, at least about 3, at least about 3.5, at least about 4, at least about 4.5, at least about 5 or more. In some cases, the bacterial strain described herein may have a vaginally relevant carbohydrate growth ratio of at most about 0.01, at most about 0.02, at most about 0.05, at most about 0.1, at most about 0.2, at most about 0.3, at most about 0.4, at most about 0.5, at most about 0.6, at most about 0.7, at most about 0.8, at most about 0.9, at most about 1, at most about 1.1, at most about 1.2, at most about 1.3, at most about 1.4, at most about 1.5, at most about 1.6, at most about 1.7, at most about 1.8, at most about 1.9, at most about 2, at most about 2.5, at most about 3, at most about 3.5, at most about 4, at most about 4.5, or at most about 5.

[0212] In some cases, the bacterial strain described herein may have a vaginally relevant carbohydrate growth ratio that is at least about 0.001%, at least about 0.001%, at least about 0.01%, at least about 0.1%, at least about 1%, at least about 2%, at least about 3%, at least about 4%, at least about 5%, at least about 6%, at least about 7%, at least about 8%, at least about 9%, at least about 10%, at least about 20%, at least about 30%, at least about 40%, at least about 50%, at least about 60%, at least about 70%, at least about 80%, at least about 90%, at least about 100%, at least about 150%, at least about 2-fold, at least about 3-fold, at least about 4-fold, at least about 5-fold, at least about 6-fold, at least about 7-fold, at least about 8-fold, at least about 9-fold, at least about 10-fold, at least about 100-fold, at least about 1000-fold, at least about 10000-fold, at least about 100000-fold, or at least about 1000000-fold higher than that of a control strain. In some cases, the bacterial strain described herein may have a vaginally relevant carbohydrate growth ratio that is at most about 0.001%, at most about 0.001%, at most about 0.010%, at most about 0.1%, at most about 1%, at most about 2%, at most about 3%, at most about 4%, at most about 5%, at most about 6%, at most about 7%, at most about 8%, at most about 9%, at most about 10%, at most about 20%, at most about 30%, at most about 40%, at most about 50%, at most about 60%, at most about 70%, at most about 80%, at most about 90%, at most about 100%, at most about 150%, at most about 2-fold, at most about 3-fold, at most about 4-fold, at most about 5-fold, at most about 6-fold, at most about 7-fold, at most about 8-fold, at most about 9-fold, at most about 10-fold, at most about 100-fold, at most about 1000-fold, at most about 10000-fold, at most about 100000-fold, or at most about 1000000-fold higher than that of a control strain. The control strain may comprise LP01; LBV96; LBV88; or LBV116.

[0213] In some cases, the bacterial strain described herein may have a vaginally relevant carbohydrate growth ratio (for glycogen) of at least about 0.01, at least about 0.02, at least about 0.05, at least about 0.1, at least about 0.2, at least about 0.3, at least about 0.4, at least about 0.5, at least about 0.6, at least about 0.7, at least about 0.8, at least about 0.9, at least about 1, at least about 1.1, at least about 1.2, at least about 1.3, at least about 1.4, at least about 1.5, at least about 1.6, at least about 1.7, at least about 1.8, at least about 1.9, at least about 2, at least about 2.5, at least about 3, at least about 3.5, at least about 4, at least about 4.5, at least about 5 or more. In some cases, the bacterial strain described herein may have a vaginally relevant carbohydrate growth ratio (for glycogen) of at most about 0.01, at most about 0.02, at most about 0.05, at most about 0.1, at most about 0.2, at most about 0.3, at most about 0.4, at most about 0.5, at most about 0.6, at most about 0.7, at most about 0.8, at most about 0.9, at most about 1, at most about 1.1, at most about 1.2, at most about 1.3, at most about 1.4, at most about 1.5, at most about 1.6, at most about 1.7, at most about 1.8, at most about 1.9, at most about 2, at most about 2.5, at most about 3, at most about 3.5, at most about 4, at most about 4.5, or at most about 5. In some cases, the bacterial strain described herein may have a vaginally relevant carbohydrate growth ratio (for bioglycogen) of at least about 0.01, at least about 0.02, at least about 0.05, at least about 0.1, at least about 0.2, at least about 0.3, at least about 0.4, at least about 0.5, at least about 0.6, at least about 0.7, at least about 0.8, at least about 0.9, at least about 1, at least about 1.1, at least about 1.2, at least about 1.3, at least about 1.4, at least about 1.5, at least about 1.6, at least about 1.7, at least about 1.8, at least about 1.9, at least about 2, at least about 2.5, at least about 3, at least about 3.5, at least about 4, at least about 4.5, at least about 5 or more. In some cases, the bacterial strain described herein may have a vaginally relevant carbohydrate growth ratio (for bioglycogen) of at most about 0.01, at most about 0.02, at most about 0.05, at most about 0.1, at most about 0.2, at most about 0.3, at most about 0.4, at most about 0.5, at most about 0.6, at most about 0.7, at most about 0.8, at most about 0.9, at most about 1, at most about 1.1, at most about 1.2, at most about 1.3, at most about 1.4, at most about 1.5, at most about 1.6, at most about 1.7, at most about 1.8, at most about 1.9, at most about 2, at most about 2.5, at most about 3, at most about 3.5, at most about 4, at most about 4.5, or at most about 5. In some cases, the bacterial strain described herein may have a vaginally relevant carbohydrate growth ratio (for dextrin) of at least about 0.01, at least about 0.02, at least about 0.05, at least about 0.1, at least about 0.2, at least about 0.3, at least about 0.4, at least about 0.5, at least about 0.6, at least about 0.7, at least about 0.8, at least about 0.9, at least about 1, at least about 1.1, at least about 1.2, at least about 1.3, at least about 1.4, at least about 1.5, at least about 1.6, at least about 1.7, at least about 1.8, at least about 1.9, at least about 2, at least about 2.5, at least about 3, at least about 3.5, at least about 4, at least about 4.5, at least about 5 or more. In some cases, the bacterial strain described herein may have a vaginally relevant carbohydrate growth ratio (for dextrin) of at most about 0.01, at most about 0.02, at most about 0.05, at most about 0.1, at most about 0.2, at most about 0.3, at most about 0.4, at most about 0.5, at most about 0.6, at most about 0.7, at most about 0.8, at most about 0.9, at most about 1, at most about 1.1, at most about 1.2, at most about 1.3, at most about 1.4, at most about 1.5, at most about 1.6, at most about 1.7, at most about 1.8, at most about 1.9, at most about 2, at most about 2.5, at most about 3, at most about 3.5, at most about 4, at most about 4.5, or at most about 5. In some cases, the bacterial strain described herein may have a vaginally relevant carbohydrate growth ratio (for maltodextrin) of at least about 0.01, at least about 0.02, at least about 0.05, at least about 0.1, at least about 0.2, at least about 0.3, at least about 0.4, at least about 0.5, at least about 0.6, at least about 0.7, at least about 0.8, at least about 0.9, at least about 1, at least about 1.1, at least about 1.2, at least about 1.3, at least about 1.4, at least about 1.5, at least about 1.6, at least about 1.7, at least about 1.8, at least about 1.9, at least about 2, at least about 2.5, at least about 3, at least about 3.5, at least about 4, at least about 4.5, at least about 5 or more. In some cases, the bacterial strain described herein may have a vaginally relevant carbohydrate growth ratio (for maltodextrin) of at most about 0.01, at most about 0.02, at most about 0.05, at most about 0.1, at most about 0.2, at most about 0.3, at most about 0.4, at most about 0.5, at most about 0.6, at most about 0.7, at most about 0.8, at most about 0.9, at most about 1, at most about 1.1, at most about 1.2, at most about 1.3, at most about 1.4, at most about 1.5, at most about 1.6, at most about 1.7, at most about 1.8, at most about 1.9, at most about 2, at most about 2.5, at most about 3, at most about 3.5, at most about 4, at most about 4.5, or at most about 5.

[0214] In some cases, the bacterial strain described herein may have a vaginally relevant carbohydrate growth (for example, for glycogen, bioglycogen, dextrin, or maltodextrin) ratio that is at least about 0.001%, at least about 0.001%, at least about 0.010%, at least about 0.1%, at least about 1%, at least about 2%, at least about 3%, at least about 4%, at least about 5%, at least about 6%, at least about 7%, at least about 8%, at least about 9%, at least about 10%, at least about 20%, at least about 30%, at least about 40%, at least about 50%, at least about 60%, at least about 70%, at least about 80%, at least about 90%, at least about 100%, at least about 150%, at least about 2-fold, at least about 3-fold, at least about 4-fold, at least about 5-fold, at least about 6-fold, at least about 7-fold, at least about 8-fold, at least about 9-fold, at least about 10-fold, at least about 100-fold, at least about 1000-fold, at least about 10000-fold, at least about 100000-fold, or at least about 1000000-fold higher than that of a control strain. In some cases, the bacterial strain described herein may have a vaginally relevant carbohydrate growth (for glycogen, bioglycogen, dextrin, or maltodextrin) ratio that is at most about 0.001%, at most about 0.001%, at most about 0.01%, at most about 0.1%, at most about 1%, at most about 2%, at most about 3%, at most about 4%, at most about 5%, at most about 6%, at most about 7%, at most about 8%, at most about 9%, at most about 10%, at most about 20%, at most about 30%, at most about 40%, at most about 50%, at most about 60%, at most about 70%, at most about 80%, at most about 90%, at most about 100%, at most about 150%, at most about 2-fold, at most about 3-fold, at most about 4-fold, at most about 5-fold, at most about 6-fold, at most about 7-fold, at most about 8-fold, at most about 9-fold, at most about 10-fold, at most about 100-fold, at most about 1000-fold, at most about 10000-fold, at most about 100000-fold, or at most about 1000000-fold higher than that of a control strain. The control strain may comprise LP01; LBV96; LBV88; or LBV116.

[0215] A bacterial strain described herein may have a sufficient ability in growing in a vaginal-relevant pH (a pH lower than a physiological pH). A vaginal pH may be at least about 1, at least about 1.5, at least about 2, at least about 2.5, at least about 2.6, at least about 2.7, at least about 2.8, at least about 2.9, at least about 3, at least about 3.1, at least about 3.2, at least about 3.3, at least about 3.4, at least about 3.5, at least about 3.6, at least about 3.7, at least about 3.8, at least about 3.9, at least about 4, at least about 4.1, at least about 4.2, at least about 4.3, at least about 4.4, at least about 4.5, at least about 4.6, at least about 4.7, at least about 4.8, at least about 4.9, at least about 5, at least about 5.1, at least about 5.2, at least about 5.3, at least about 5.4, at least about 5.5, at least about 5.6, at least about 5.7, at least about 5.8, at least about 5.9, or at least about 6. A vaginal pH may be at most about 1, at most about 1.5, at most about 2, at most about 2.5, at most about 2.6, at most about 2.7, at most about 2.8, at most about 2.9, at most about 3, at most about 3.1, at most about 3.2, at most about 3.3, at most about 3.4, at most about 3.5, at most about 3.6, at most about 3.7, at most about 3.8, at most about 3.9, at most about 4, at most about 4.1, at most about 4.2, at most about 4.3, at most about 4.4, at most about 4.5, at most about 4.6, at most about 4.7, at most about 4.8, at most about 4.9, at most about 5, at most about 5.1, at most about 5.2, at most about 5.3, at most about 5.4, at most about 5.5, at most about 5.6, at most about 5.7, at most about 5.8, at most about 5.9, or at most about 6. A physiological pH is at least about 6.1, at least about 6.2, at least about 6.3, at least about 6.4, at least about 6.5, at least about 6.6, at least about 6.7, at least about 6.8, at least about 6.9, at least about 7, at least about 7.1, at least about 7.2, at least about 7.3, at least about 7.4, at least about 7.5, at least about 7.6, at least about 7.7, at least about 7.8, at least about 7.9, or at least about 8. A physiological pH is at most about 6.1, at most about 6.2, at most about 6.3, at most about 6.4, at most about 6.5, at most about 6.6, at most about 6.7, at most about 6.8, at most about 6.9, at most about 7, at most about 7.1, at most about 7.2, at most about 7.3, at most about 7.4, at most about 7.5, at most about 7.6, at most about 7.7, at most about 7.8, at most about 7.9, or at most about 8.

[0216] In some cases, the growth of a bacterial strain with various pH conditions can be measured by the growth ratio between the bacterial strain grown in a culture having a vaginal pH and the bacterial strain grown in a culture having a physiological pH (also referred to as “vaginal pH/physiological pH growth ratio”). The methods for measuring vaginal pH/physiological pH growth ratio of a bacterial strain can comprise those described in EXAMPLE 2. A bacterial strain described herein may not have a sufficient ability in growing in a vaginal-relevant pH.

[0217] In some cases, the bacterial strain described herein may have a vaginal pH/physiological pH growth ratio of at least about 0.01, at least about 0.02, at least about 0.05, at least about 0.1, at least about 0.2, at least about 0.3, at least about 0.4, at least about 0.5, at least about 0.6, at least about 0.7, at least about 0.8, at least about 0.9, at least about 1, at least about 1.1, at least about 1.2, at least about 1.3, at least about 1.4, at least about 1.5, at least about 1.6, at least about 1.7, at least about 1.8, at least about 1.9, at least about 2, at least about 2.5, at least about 3, at least about 3.5, at least about 4, at least about 4.5, at least about 5 or more. In some cases, the bacterial strain described herein may have a vaginal pH/physiological pH growth ratio of at most about 0.01, at most about 0.02, at most about 0.05, at most about 0.1, at most about 0.2, at most about 0.3, at most about 0.4, at most about 0.5, at most about 0.6, at most about 0.7, at most about 0.8, at most about 0.9, at most about 1, at most about 1.1, at most about 1.2, at most about 1.3, at most about 1.4, at most about 1.5, at most about 1.6, at most about 1.7, at most about 1.8, at most about 1.9, at most about 2, at most about 2.5, at most about 3, at most about 3.5, at most about 4, at most about 4.5, or at most about 5.

[0218] In some cases, the bacterial strain described herein may have a vaginal pH/physiological pH growth ratio that is at least about 0.001%, at least about 0.001%, at least about 0.010%, at least about 0.1%, at least about 1%, at least about 2%, at least about 3%, at least about 4%, at least about 5%, at least about 6%, at least about 7%, at least about 8%, at least about 9%, at least about 10%, at least about 20%, at least about 30%, at least about 40%, at least about 50%, at least about 60%, at least about 70%, at least about 80%, at least about 90%, at least about 100%, at least about 150%, at least about 2-fold, at least about 3-fold, at least about 4-fold, at least about 5-fold, at least about 6-fold, at least about 7-fold, at least about 8-fold, at least about 9-fold, at least about 10-fold, at least about 100-fold, at least about 1000-fold, at least about 10000-fold, at least about 100000-fold, or at least about 1000000-fold higher than that of a control strain. In some cases, the bacterial strain described herein may have a vaginal pH/physiological pH growth ratio that is at most about 0.001%, at most about 0.001%, at most about 0.01%, at most about 0.1%, at most about 1%, at most about 2%, at most about 3%, at most about 4%, at most about 5%, at most about 6%, at most about 7%, at most about 8%, at most about 9%, at most about 10%, at most about 20%, at most about 30%, at most about 40%, at most about 50%, at most about 60%, at most about 70%, at most about 80%, at most about 90%, at most about 100%, at most about 150%, at most about 2-fold, at most about 3-fold, at most about 4-fold, at most about 5-fold, at most about 6-fold, at most about 7-fold, at most about 8-fold, at most about 9-fold, at most about 10-fold, at most about 100-fold, at most about 1000-fold, at most about 10000-fold, at most about 100000-fold, or at most about 1000000-fold higher than that of a control strain. The control strain may comprise LP01; LBV96; LBV88; or LBV116.

[0219] A bacterial strain described herein may have a sufficient ability in generating a bacterial product for treating or preventing a vaginal disease or a complication associated with the vaginal disease. For example, the bacterial products for treating or preventing BV can comprise lactic acids or hydrogen peroxide. The methods for measuring the amounts of the bacterial products can comprise those described in EXAMPLE 2. A bacterial strain described herein may not have a sufficient ability in generating a bacterial product for treating or preventing a vaginal disease or a complication associated with the vaginal disease.

[0220] In some cases, the bacterial strain described herein generate at least about at least about 1×10\hat{ }-3 micromolar (μM), at least about 2×10\hat{ }-3 μM, at least about 5×10\hat{ }-3 μM, at least about 1×10\hat{ }-2 μM, at least about 2×10\hat{ }-2 μM, at least about 5×10\hat{ }-2 μM, at least about 1×10\hat{ }-1 μM, at least about 2×10\hat{ }-1 μM, at least about 5×10\hat{ }-1 μM, at least about 1×10\hat{ }0 μM, at least about 2×10\hat{ }0 μM, at least about 5×10\hat{ }0 μM, at least about 1×10\hat{ }1 μM, at least about 2×10\hat{ }1 μM, at least about 5×10\hat{ }1 μM, at least about 1×10\hat{ }2 μM, at least about 2×10\hat{ }2 μM, at least about 5×10\hat{ }2 μM, at least about 1×10\hat{ }3 μM, at least about 2×10\hat{ }3 μM, at least about 5×10\hat{ }3 μM, at least about 1×10\hat{ }4 μM, at least about 2×10\hat{ }4 μM, at least about 5×10\hat{ }4 μM, at least about 1×10\hat{ }5 μM, at least about 2×10\hat{ }5 μM, at least about 5×10\hat{ }5 μM, at least about 1×10\hat{ }6 μM, at least about 2×10\hat{ }6 μM, at least about 5×10\hat{ }6 μM hydrogen peroxide, as measured the method described in EXAMPLE 2. In some cases, the bacterial strain described herein generate at most about at most about 1×10\hat{ }-3 micromolar (μM), at most about 2×10\hat{ }-3 μM, at most about 5×10\hat{ }-3 μM, at most about 1×10\hat{ }-2 μM, at most about 2×10\hat{ }-2 μM, at most about 5×10\hat{ }-2 μM, at most about 1×10\hat{ }-1 μM, at most about 2×10\hat{ }-1 μM, at most about 5×10\hat{ }-1 μM, at most about 1×10\hat{ }0 μM, at most about 2×10\hat{ }0 μM, at most about 5×10\hat{ }0 μM, at most about 1×10\hat{ }1 μM, at most about 2×10\hat{ }1 μM, at most about 5×10\hat{ }1 μM, at most about 1×10\hat{ }2 μM, at most about 2×10\hat{ }2 μM, at most about 5×10\hat{ }2 μM, at most about 1×10\hat{ }3 μM, at most about 2×10\hat{ }3 μM, at most about 5×10\hat{ }3 μM, at most about 1×10\hat{ }4 μM, at most about 2×10\hat{ }4 μM, at most about 5×10\hat{ }4 μM, at most about 1×10\hat{ }5 μM, at most about 2×10\hat{ }5 μM, at most about 5×10\hat{ }5 μM, at most about 1×10\hat{ }6 μM, at most about 2×10\hat{ }6 μM, at most about 5×10\hat{ }6 μM hydrogen peroxide, as measured the method described in EXAMPLE 2.

[0221] In some cases, the bacterial strain described herein generate at least about 0.001%, at least about 0.001%, at least about 0.01%, at least about 0.1%, at least about 1%, at least about 2%, at least about 3%, at least about 4%, at least about 5%, at least about 6%, at least about 7%, at least about 8%, at least about 9%, at least about 10%, at least about 20%, at least about 30%, at least about 40%, at least about 50%, at least about 60%, at least about 70%, at least about 80%, at least about 90%, at least about 100%, at least about 150%, at least about 2-fold, at least about 3-fold, at least about 4-fold, at least about 5-fold, at least about 6-fold, at least about 7-fold, at least about 8-fold, at least about 9-fold, at least about 10-fold, at least about 100-fold, at least about 1000-fold, at least about 10000-fold, at least about 100000-fold, or at least about 1000000-fold more hydrogen peroxide than that of a control strain. In some cases, the bacterial strain described herein generate at most about 0.001%, at most about 0.001%, at most about 0.010%, at most about 0.1%, at most about 1%, at most about 2%, at most about 3%, at most about 4%, at most about 5%, at most about 6%, at most about 7%, at most about 8%, at most about 9%, at most about 10%, at most about 20%, at most about 30%, at most about 40%, at most about 50%, at most about 60%, at most about 70%, at most about 80%, at most about 90%, at most about 100%, at most about 150%, at most about 2-fold, at most about 3-fold, at most about 4-fold, at most about 5-fold, at most about 6-fold, at most about 7-fold, at most about 8-fold, at most about 9-fold, at most about 10-fold, at most about 100-fold, at most about 1000-fold, at most about 10000-fold, at most about 100000-fold, or at most about 1000000-fold more hydrogen peroxide than that of a control strain. The control strain may comprise LP01; LBV96; LBV88; or LBV116.

[0222] In some cases, the bacterial strain described herein generate at least about 1×10\hat{ }1 RLU of lactic acids at least about 2×10\hat{ }1 RLU of lactic acids at least about 5×10\hat{ }1 RLU of lactic acids at least about 1×10\hat{ }2 RLU of lactic acids at least about 2×10\hat{ }2 RLU of lactic acids at least about 5×10\hat{ }2 RLU of lactic acids at least about 1×10\hat{ }3 RLU of lactic acids at least about 2×10\hat{ }3 RLU of lactic acids at least about 5×10\hat{ }3 RLU of lactic acids at least about 1×10\hat{ }4 RLU of lactic acids at least about 2×10\hat{ }4 RLU of lactic acids at least about 5×10\hat{ }4 RLU of lactic acids at least about 1×10\hat{ }5 RLU of lactic acids at least about 2×10\hat{ }5 RLU of lactic acids at least about 5×10\hat{ }5 RLU of lactic acids at least about 1×10\hat{ }6 RLU of lactic acids at least about 2×10\hat{ }6 RLU of lactic acids at least about 5×10\hat{ }6 RLU of lactic acids, as measured the method described in EXAMPLE 2. In some cases, the bacterial strain described herein generate at most about at most about 1×10\hat{ }1 RLU of lactic acids at most about 2×10\hat{ }1 RLU of lactic acids at most about 5×10\hat{ }1 RLU of lactic acids at most about 1×10\hat{ }2 RLU of lactic acids at most about 2×10\hat{ }2 RLU of lactic acids at most about 5×10\hat{ }2 RLU of lactic acids at most about 1×10\hat{ }3 RLU of lactic acids at most about 2×10\hat{ }3 RLU of lactic acids at most about 5×10\hat{ }3 RLU of lactic acids at most about 1×10\hat{ }4 RLU of lactic acids at most about 2×10\hat{ }4 RLU of lactic acids at most about 5×10\hat{ }4 RLU of lactic acids at most about 1×10\hat{ }5 RLU of lactic acids at most about 2×10\hat{ }5 RLU of lactic acids at most about 5×10\hat{ }5 RLU of lactic acids at most about 1×10\hat{ }6 RLU of lactic acids at most about 2×10\hat{ }6 RLU of lactic acids at most about 5×10\hat{ }6 RLU of lactic acids, as measured the method described in EXAMPLE 2.

[0223] In some cases, the bacterial strain described herein generate at least about 0.001%, at least about 0.001%, at least about 0.01%, at least about 0.1%, at least about 1%, at least about 2%, at least about 3%, at least about 4%, at least about 5%, at least about 6%, at least about 7%, at least about 8%, at least about 9%, at least about 10%, at least about 20%, at least about 30%, at least about 40%, at least about 50%, at least about 60%, at least about 70%, at least about 80%, at least about 90%, at least about 100%, at least about 150%, at least about 2-fold, at least about 3-fold, at least about 4-fold, at least about 5-fold, at least about 6-fold, at least about 7-fold, at least about 8-fold, at least about 9-fold, at least about 10-fold, at least about 100-fold, at least about 1000-fold, at least about 10000-fold, at least about 100000-fold, or at least about 1000000-fold more lactic acids than that of a control strain. In some cases, the bacterial strain described herein generate at most about 0.001%, at most about 0.001%, at most about 0.010%, at most about 0.1%, at most about 1%, at most about 2%, at most about 3%, at most about 4%, at most about 5%, at most about 6%, at most about 7%, at most about 8%, at most about 9%, at most about 10%, at most about 20%, at most about 30%, at most about 40%, at most about 50%, at most about 60%, at most about 70%, at most about 80%, at most about 90%, at most about 100%, at most about 150%, at most about 2-fold, at most about 3-fold, at most about 4-fold, at most about 5-fold, at most about 6-fold, at most about 7-fold, at most about 8-fold, at most about 9-fold, at most about 10-fold, at most about 100-fold, at most about 1000-fold, at most about 10000-fold, at most about 100000-fold, or at most about 1000000-fold more lactic acids than that of a control strain. The control strain may comprise LP01; LBV96; LBV88; or LBV116.

### 2. NEC-Associated Functions

[0224] A bacterial strain described herein (or the cultured medium thereof; or a bacterial product encompassed within that cultured medium) may have a sufficient ability in the adherence to an IEC. In some cases, the bacterial strain (or the cultured medium thereof; or a bacterial product encompassed within that cultured medium) may exhibit an adherence to the IEC by at least about 1×10\hat{ }1 CFU per 9.5 cm\hat{ }2 of IEC, at least about 2×10\hat{ }1 CFU per 9.5 cm\hat{ }2 of IEC, at least about 5×10\hat{ }1 CFU per 9.5 cm\hat{ }2 of IEC, at least about 1×10\hat{ }2 CFU per 9.5 cm\hat{ }2 of IEC, at least about 2×10\hat{ }2 CFU per 9.5 cm\hat{ }2 of IEC, at least about 5×10\hat{ }2 CFU per 9.5 cm\hat{ }2 of IEC, at least about 1×10\hat{ }3 CFU per 9.5 cm\hat{ }2 of IEC, at least about 2×10\hat{ }3 CFU per 9.5 cm\hat{ }2 of IEC, at least about 5×10\hat{ }3 CFU per 9.5 cm\hat{ }2 of IEC, at least about 1×10\hat{ }4 CFU per 9.5 cm\hat{ }2 of IEC, at least about 2×10\hat{ }4 CFU per 9.5 cm\hat{ }2 of IEC, at least about 5×10\hat{ }4 CFU per 9.5 cm\hat{ }2 of IEC, at least about 1×10\hat{ }5 CFU per 9.5 cm\hat{ }2 of IEC, at least about 2×10\hat{ }5 CFU per 9.5 cm\hat{ }2 of IEC, at least about 5×10\hat{ }5 CFU per 9.5 cm\hat{ }2 of IEC, at least about 1×10\hat{ }6 CFU per 9.5 cm\hat{ }2 of IEC, at least about 2×10\hat{ }6 CFU per 9.5 cm\hat{ }2 of IEC, at least about 5×10\hat{ }6 CFU per 9.5 cm\hat{ }2 of IEC, at least about 1×10\hat{ }7 CFU per 9.5 cm\hat{ }2 of IEC, at least about 2×10\hat{ }7 CFU per 9.5 cm\hat{ }2 of IEC, at least about 5×10\hat{ }7 CFU per 9.5 cm\hat{ }2 of IEC, at least about 1×10\hat{ }8 CFU per 9.5 cm\hat{ }2 of IEC, at least about 2×10\hat{ }8 CFU per 9.5 cm\hat{ }2 of IEC, at least about 5×10\hat{ }8 CFU per 9.5 cm\hat{ }2 of IEC, at least about 1×10\hat{ }9 CFU per 9.5 cm\hat{ }2 of IEC, at least about 2×10\hat{ }9 CFU per 9.5 cm\hat{ }2 of IEC, at least about 5×10\hat{ }9 CFU per 9.5 cm\hat{ }2 of IEC, at least about 1×10\hat{ }10 CFU per 9.5 cm\hat{ }2 of IEC, at least about 2×10\hat{ }10 CFU per 9.5 cm\hat{ }2 of IEC, at least about 5×10\hat{ }10 CFU per 9.5 cm\hat{ }2 of IEC, at least about 1×10\hat{ }11 CFU per 9.5 cm\hat{ }2 of IEC, at least about 2×10\hat{ }11 CFU per 9.5 cm\hat{ }2 of IEC, at least about 5×10\hat{ }11 CFU per 9.5 cm\hat{ }2 of IEC, at least about 1×10\hat{ }12 CFU per 9.5 cm\hat{ }2 of IEC, at least about 2×10\hat{ }12 CFU per 9.5 cm\hat{ }2 of IEC, at least about 5×10\hat{ }12 CFU per 9.5 cm\hat{ }2 of IEC or more. In some cases, the bacterial strain (or the cultured medium thereof; or a bacterial product encompassed within that cultured medium) may exhibit an adherence to the IEC by at most about 1×10\hat{ }1 CFU per 9.5 cm\hat{ }2 of IEC, at most about 2×10\hat{ }1 CFU per 9.5 cm\hat{ }2 of IEC, at most about 5×10\hat{ }1 CFU per 9.5 cm\hat{ }2 of IEC, at most about 1×10\hat{ }2 CFU per 9.5 cm\hat{ }2 of IEC, at most about 2×10\hat{ }2 CFU per 9.5 cm\hat{ }2 of IEC, at most about 5×10\hat{ }2 CFU per 9.5 cm\hat{ }2 of IEC, at most about 1×10\hat{ }3 CFU per 9.5 cm\hat{ }2 of IEC, at most about 2×10\hat{ }3 CFU per 9.5 cm\hat{ }2 of IEC, at most about 5×10\hat{ }3 CFU per 9.5 cm\hat{ }2 of IEC, at most about 1×10\hat{ }4 CFU per 9.5 cm\hat{ }2 of IEC, at most about 2×10\hat{ }4 CFU per 9.5 cm\hat{ }2 of IEC, at most about 5×10\hat{ }4 CFU per 9.5 cm\hat{ }2 of IEC, at most about 1×10\hat{ }5 CFU per 9.5 cm\hat{ }2 of IEC, at most about 2×10\hat{ }5 CFU per 9.5 cm\hat{ }2 of IEC, at most about 5×10\hat{ }5 CFU per 9.5 cm\hat{ }2 of IEC, at most about 1×10\hat{ }6 CFU per 9.5 cm\hat{ }2 of IEC, at most about 2×10\hat{ }6 CFU per 9.5 cm\hat{ }2 of IEC, at most about 5×10\hat{ }6 CFU per 9.5 cm\hat{ }2 of IEC, at most about 1×10\hat{ }7 CFU per 9.5 cm\hat{ }2 of IEC, at most about 2×10\hat{ }7 CFU per 9.5 cm\hat{ }2 of IEC, at most about 5×10\hat{ }7 CFU per 9.5 cm\hat{ }2 of IEC, at most about 1×10\hat{ }8 CFU per 9.5 cm\hat{ }2 of IEC, at most about 2×10\hat{ }8 CFU per 9.5 cm\hat{ }2 of IEC, at most about 5×10\hat{ }8 CFU per 9.5 cm\hat{ }2 of IEC, at most about 1×10\hat{ }9 CFU per 9.5 cm\hat{ }2 of IEC, at most about 2×10\hat{ }9 CFU per 9.5 cm\hat{ }2 of IEC, at most about 5×10\hat{ }9 CFU per 9.5 cm\hat{ }2 of IEC, at most about 1×10\hat{ }10 CFU per 9.5 cm\hat{ }2 of IEC, at most about 2×10\hat{ }10 CFU per 9.5 cm\hat{ }2 of IEC, at most about 5×10\hat{ }10 CFU per 9.5 cm\hat{ }2 of IEC, at most about 1×10\hat{ }11 CFU per 9.5 cm\hat{ }2 of IEC, at most about 2×10\hat{ }11 CFU per 9.5 cm\hat{ }2 of IEC, at most about 5×10\hat{ }11 CFU per 9.5 cm\hat{ }2 of IEC, at most about 1×10\hat{ }12 CFU per 9.5 cm\hat{ }2 of IEC, at most about 2×10\hat{ }12 CFU per 9.5 cm\hat{ }2 of IEC, or at most about 5×10\hat{ }12 CFU per 9.5 cm\hat{ }2 of IEC. In some cases, the bacterial strain described herein may have an adherence to an IEC that is at least about 0.001%, at least about 0.001%, at least about 0.01%, at least about 0.1%, at least about 1%, at least about 2%, at least about 3%, at least about 4%, at least about 5%, at least about 6%, at least about 7%, at least about 8%, at least about 9%, at least about 10%, at least about 20%, at least about 30%, at least about 40%, at least about 50%, at least about 60%, at least about 70%, at least about 80%, at least about 90%, at least about 100%, at least about 150%, at least about 2-fold, at least about 3-fold, at least about 4-fold, at least about 5-fold, at least about 6-fold, at least about 7-fold, at least about 8-fold, at least about 9-fold, at least about 10-fold, at least about 100-fold, at least about 1000-fold, at least about 10000-fold, at least about 100000-fold, or at least about 1000000-fold higher than that of a control strain. In some cases, the bacterial strain described herein may have an adherence to an IEC that is at most about 0.001%, at most about 0.001%, at most about 0.010%, at most about 0.1%, at most about 1%, at most about 2%, at most about 3%, at most about 4%, at most about 5%, at most about 6%, at most about 7%, at most about 8%, at most about 9%, at most about 10%, at most about 20%, at most about 30%, at most about 40%, at most about 50%, at most about 60%, at most about 70%, at most about 80%, at most about 90%, at most about 100%, at most about 150%, at most about 2-fold, at most about 3-fold, at most about 4-fold, at most about 5-fold, at most about 6-fold, at most about 7-fold, at most about 8-fold, at most about 9-fold, at most about 10-fold, at most about 100-fold, at most about 1000-fold, at most about 10000-fold, at most about 100000-fold, or at most about 1000000-fold higher than that of a control strain. The control strain may comprise EV27 (or referred to as evc001; described in BMC Pediatr. 2017; 17: 133); which is herein incorporated by reference in its entirety); BG49 (or referred to as IBP-9414; described in U.S. clinical trial no. NCT03978000; which is herein incorporated by reference in its entirety. The adherence to the IEC can be measured by contacting a population of a bacterial strains to an IEC and measuring the number of the bacteria cells attached or adhered to the IEC. For example, the adherence to the IEC can be measured by the methods described herein, such as those described in EXAMPLE 3. A bacterial strain described herein (or the cultured medium thereof; or a bacterial product encompassed within that cultured medium) may not have a sufficient ability in the adherence to an IEC.

[0225] A bacterial strain described herein (or the cultured medium thereof; or a bacterial product encompassed within that cultured medium) may have a sufficient ability in inhibiting a growth of an infant gastrointestinal pathogen. The infant gastrointestinal pathogen may comprise E. coli, K. pneumoniae, C. perfringens, S. aureus, S. flexneri, or a combination thereof. The infant gastrointestinal pathogen may comprise E. coli. The infant gastrointestinal pathogen may comprise K. pneumoniae. The infant gastrointestinal pathogen may comprise C. perfringens. The infant gastrointestinal pathogen may comprise S. aureus. The infant gastrointestinal pathogen may comprise S. flexneri. The infant gastrointestinal pathogen may comprise E. coli, K. pneumoniae, C. perfringens, S. aureus, and S. flexneri. A bacterial strain described herein (or the cultured medium thereof; or a bacterial product encompassed within that cultured medium) may not have a sufficient ability in inhibiting a growth of an infant gastrointestinal pathogen.

[0226] In some cases, the bacterial strain (or the cultured medium thereof; or a bacterial product encompassed within that cultured medium) may inhibit the growth of an infant gastrointestinal pathogen by at least about 1%, at least about 2%, at least about 3%, at least about 4%, at least about 5%, at least about 10%, at least about 15%, at least about 20%, at least about 25%, at least about 30%, at least about 35%, at least about 40%, at least about 45%, at least about 50%, at least about 55%, at least about 60%, at least about 65%, at least about 70%, at least about 75%, at least about 80%, at least about 85%, at least about 90%, at least about 95%, or at least about 100%, relative to a growth of the pathogen when inhibited by a control. The control may comprise growing the infant gastrointestinal pathogen with a media control or without the bacterial strain (such as those described in EXAMPLE 3). The control may comprise growing the infant gastrointestinal pathogen without the bacterial strain. In some cases, the bacterial strain (or the cultured medium thereof; or a bacterial product encompassed within that cultured medium) may inhibit the growth of an infant gastrointestinal pathogen by at most about 1%, at most about 2%, at most about 3%, at most about 4%, at most about 5%, at most about 10%, at most about 15%, at most about 20%, at most about 25%, at most about 30%, at most about 35%, at most about 40%, at most about 45%, at most about 50%, at most about 55%, at most about 60%, at most about 65%, at most about 70%, at most about 75%, at most about 80%, at most about 85%, at most about 90%, at most about 95%, or at most about 100%, relative to a growth of the pathogen when inhibited by the control.

[0227] In some cases, the bacterial strain described herein (or the cultured medium thereof; or a bacterial product encompassed within that cultured medium) may exhibit an inhibition of the growth of an infant gastrointestinal pathogen that is at least about 0.001%, at least about 0.001%, at least about 0.01%, at least about 0.1%, at least about 1%, at least about 2%, at least about 3%, at least about 4%, at least about 5%, at least about 6%, at least about 7%, at least about 8%, at least about 9%, at least about 10%, at least about 20%, at least about 30%, at least about 40%, at least about 50%, at least about 60%, at least about 70%, at least about 80%, at least about 90%, at least about 100%, at least about 150%, at least about 2-fold, at least about 3-fold, at least about 4-fold, at least about 5-fold, at least about 6-fold, at least about 7-fold, at least about 8-fold, at least about 9-fold, at least about 10-fold, at least about 100-fold, at least about 1000-fold, at least about 10000-fold, at least about 100000-fold, or at least about 1000000-fold higher than that of a control strain (or the cultured medium thereof; or a bacterial product encompassed within that cultured medium). In some cases, the bacterial strain described herein (or the cultured medium thereof; or a bacterial product encompassed within that cultured medium) may exhibit an inhibition of the growth of an infant gastrointestinal pathogen that is at most about 0.001%, at most about 0.001%, at most about 0.010%, at most about 0.1%, at most about 1%, at most about 2%, at most about 3%, at most about 4%, at most about 5%, at most about 6%, at most about 7%, at most about 8%, at most about 9%, at most about 10%, at most about 20%, at most about 30%, at most about 40%, at most about 50%, at most about 60%, at most about 70%, at most about 80%, at most about 90%, at most about 100%, at most about 150%, at most about 2-fold, at most about 3-fold, at most about 4-fold, at most about 5-fold, at most about 6-fold, at most about 7-fold, at most about 8-fold, at most about 9-fold, at most about 10-fold, at most about 100-fold, at most about 1000-fold, at most about 10000-fold, at most about 100000-fold, or at most about 1000000-fold higher than that of a control strain (or the cultured medium thereof; or a bacterial product encompassed within that cultured medium). The control strain may comprise EV27 or BG49. The inhibition of the growth of the pathogen can be measured by contacting the bacterial strains to the infant gastrointestinal pathogen and measuring the growth of the infant gastrointestinal pathogen. For example, the inhibition of the growth of the infant gastrointestinal pathogen can be measured by the methods described herein, such as those described in EXAMPLE 3.

[0228] A bacterial strain described herein (or the cultured medium thereof; or a bacterial product encompassed within that cultured medium) may have a sufficient ability in inhibiting a signaling pathway of a cell. Alteration of a signaling pathway may comprise altering an output of that signaling pathway. The output of that signaling pathway can comprise a transcriptional, translational, post-transcriptional, post-translational, metabolic, or cellular output; or a combination thereof. Inhibition (or activation) of a signaling pathway may comprise decreasing (or increasing) an output of that signaling pathway. In some cases, the bacterial strain described herein (or the cultured medium thereof; or a bacterial product encompassed within that cultured medium) having a sufficient ability in inhibiting (or activating) a signaling pathway can inhibit (or activate) a signal of a reporter of the signaling pathway. The reporter can comprise a transcriptional, translational, post-transcriptional, post-translational, metabolic, or cellular reporter; or a combination thereof. The reporter can be genetically engineered. The reporter can generate or facilitate a generation of the signal. The signal can be optical. The signal can be fluorescence. The signaling pathway may comprise an immune response signaling pathway. In some cases, the immune response signaling pathway may comprise an innate immune response signaling pathway. In some cases, the immune response signaling pathway may comprise an adaptive immune response signaling pathway. In some cases, the immune response signaling pathway may comprise an inflammatory immune response signaling pathway. The innate immune response signaling pathway may comprise Recognition Receptor (PRR) signaling pathway. The PPR signaling pathway may recognize molecules of by pathogens (Pathogen-Associated Molecular Patterns/PAMPs) or by damaged cells (the Damage-Associated Molecular Patterns/DAMPs). In some cases, the innate immune response signaling pathway may comprise toll-like receptor (TLR) signaling pathway. The TLR signaling pathway may comprise signaling pathways mediated by TLR1, TLR2, TLR3, TLR4, TLR5, TLR6, TLR7, TLR8, TLR9, TLR10, TLR11, TLR12, TLR13, or a combination thereof. In some cases, the immune response signaling pathway may comprise TLR1 signaling pathway. In some cases, the immune response signaling pathway may comprise TLR2 signaling pathway. In some cases, the immune response signaling pathway may comprise TLR3 signaling pathway. In some cases, the immune response signaling pathway may comprise TLR4 signaling pathway. In some cases, the immune response signaling pathway may comprise TLR5 signaling pathway. In some cases, the immune response signaling pathway may comprise TLR6 signaling pathway. In some cases, the immune response signaling pathway may comprise TLR7 signaling pathway. In some cases, the immune response signaling pathway may comprise TLR8 signaling pathway. In some cases, the immune response signaling pathway may comprise TLR9 signaling pathway. In some cases, the immune response signaling pathway may comprise TLR10 signaling pathway. In some cases, the immune response signaling pathway may comprise TLR11 signaling pathway. In some cases, the immune response signaling pathway may comprise TLR12 signaling pathway. In some cases, the immune response signaling pathway may comprise TLR13 signaling pathway. In some cases, the immune response signaling pathway may comprise nuclear factor kappa-light-chain-enhancer of activated B cells (NF-κB). In some cases, the immune response signaling pathway may comprise a ligand. The ligand can comprise a PAMP. The ligand can comprise a DAMP. The ligand can comprise a ligand of a gram-positive bacteria. The ligand can comprise a ligand of a gram-negative bacteria. The ligand of a gram-negative bacteria can comprise lipopolysaccharide (LPS). In some cases, the immune response signaling pathway may comprise nuclear factor kappa-light-chain-enhancer of activated B cells (NF-κB) signaling pathway. In some cases, the immune response signaling pathway may comprise interferon signaling pathway. In some cases, the bacterial strain or bacterial population described herein can inhibit the immune response pathway of a cell of a subject being administered with the composition or formulation comprising the bacterial strain or bacterial population. The cell may comprise an immune cell. The immune cell may comprise a macrophage, B-cell, or a T-cell. A bacterial strain described herein (or the cultured medium thereof; or a bacterial product encompassed within that cultured medium) may not have a sufficient ability in inhibiting a signaling pathway of a cell.

[0229] In some cases, the bacterial strain (or the cultured medium thereof; or a bacterial product encompassed within that cultured medium) may inhibit the immune response signaling pathway by at least about 1%, at least about 2%, at least about 3%, at least about 4%, at least about 5%, at least about 10%, at least about 15%, at least about 20%, at least about 25%, at least about 30%, at least about 35%, at least about 40%, at least about 45%, at least about 50%, at least about 55%, at least about 60%, at least about 65%, at least about 70%, at least about 75%, at least about 80%, at least about 85%, at least about 90%, at least about 95%, or at least about 100%, relative to immune response signaling pathway when inhibited by a control. The control may comprise inhibiting the immune response signaling pathway with a media control or without the bacterial strain (such as those described in EXAMPLE 3). In some cases, the bacterial strain (or the cultured medium thereof; or a bacterial product encompassed within that cultured medium) may inhibit the immune response signaling pathway by at most about 1%, at most about 2%, at most about 3%, at most about 4%, at most about 5%, at most about 10%, at most about 15%, at most about 20%, at most about 25%, at most about 30%, at most about 35%, at most about 40%, at most about 45%, at most about 50%, at most about 55%, at most about 60%, at most about 65%, at most about 70%, at most about 75%, at most about 80%, at most about 85%, at most about 90%, at most about 95%, or at most about 100%, relative to the immune response signaling pathway when inhibited by the control.

[0230] In some cases, the bacterial strain described herein (or the cultured medium thereof; or a bacterial product encompassed within that cultured medium) may exhibit an inhibition of the immune response signaling pathway that is at least about 0.001%, at least about 0.001%, at least about 0.01%, at least about 0.1%, at least about 1%, at least about 2%, at least about 3%, at least about 4%, at least about 5%, at least about 6%, at least about 7%, at least about 8%, at least about 9%, at least about 10%, at least about 20%, at least about 30%, at least about 40%, at least about 50%, at least about 60%, at least about 70%, at least about 80%, at least about 90%, at least about 100%, at least about 150%, at least about 2-fold, at least about 3-fold, at least about 4-fold, at least about 5-fold, at least about 6-fold, at least about 7-fold, at least about 8-fold, at least about 9-fold, at least about 10-fold, at least about 100-fold, at least about 1000-fold, at least about 10000-fold, at least about 100000-fold, or at least about 1000000-fold higher than that of a control strain (or the cultured medium thereof; or a bacterial product encompassed within that cultured medium). In some cases, the bacterial strain described herein (or the cultured medium thereof; or a bacterial product encompassed within that cultured medium) may exhibit an inhibition of the immune response signaling pathway that is at most about 0.001%, at most about 0.001%, at most about 0.01%, at most about 0.1%, at most about 1%, at most about 2%, at most about 3%, at most about 4%, at most about 5%, at most about 6%, at most about 7%, at most about 8%, at most about 9%, at most about 10%, at most about 20%, at most about 30%, at most about 40%, at most about 50%, at most about 60%, at most about 70%, at most about 80%, at most about 90%, at most about 100%, at most about 150%, at most about 2-fold, at most about 3-fold, at most about 4-fold, at most about 5-fold, at most about 6-fold, at most about 7-fold, at most about 8-fold, at most about 9-fold, at most about 10-fold, at most about 100-fold, at most about 1000-fold, at most about 10000-fold, at most about 100000-fold, or at most about 1000000-fold higher than that of a control strain (or the cultured medium thereof; or a bacterial product encompassed within that cultured medium). The control strain may comprise EV27 or BG49. The inhibition (or activation) of a signaling pathway or the immune response signaling pathway can be measured by contacting the bacterial strains (or the cultured medium thereof; or a bacterial product encompassed within that cultured medium) to a cell comprising a reporter or an immune response reporter of the immune response signaling pathway and measuring the reporter or immune response reporter. The cell may comprise an engineered cell. The engineered cell may comprise a mammalian cell. The mammalian cell may comprise an immune cell. The immune cell may comprise a macrophage, B-cell, or a T-cell. In some cases, when measuring the immune response signaling pathway using the immune response reporter, the immune response reporter may be activated by a ligand (by contacting the ligand to the cell comprising the reporter), and the cell is then contacted with the bacterial strain. The activation (or inhibition or lack of activation) is then measured. The ligand can comprise a PAMP. The ligand can comprise a DAMP. The ligand can comprise a ligand of a gram-positive bacteria. The ligand can comprise a ligand of a gram-negative bacteria. The ligand of a gram-negative bacteria can comprise lipopolysaccharide (LPS). The immune response reporter may comprise a reporter for the TLR. In some cases, the immune response reporter may comprise a TLR4 reporter. In some embodiments, the engineered cell can comprise a macrophage. In some embodiments, the reporter can comprise a NFkB reporter or an interferon-sensitive response element reporter (ISRE). In some embodiments, the TLR4 reporter can comprise a NFkB reporter or an interferon-sensitive response element reporter (ISRE). In some embodiments, the TLR4 reporter can comprise a NFkB reporter. In some embodiments, the TLR4 reporter can comprise a ISRE reporter In some embodiments, the NFkB reporter can comprise a secreted embryonic alkaline phosphatase (SEAP) reporter. In some embodiments, the ISRE reporter can comprise a Lucia luciferase. For example, the inhibition of the growth of the vaginal pathogen can be measured by the methods described herein, such as those described in EXAMPLE 3.

[0231] A bacterial strain described herein (or the cultured medium thereof; or a bacterial product encompassed within that cultured medium) may have a sufficient ability in increasing the integrity of a barrier comprising IEC. The method to measure the integrity of the barrier comprising IEC may comprise contacting a bacterial strain with a barrier comprising IEC and measuring the cellular impedance of the barrier. The methods for measuring the barrier integrity are described herein, for example, in EXAMPLE 3. In some cases, a bacterial strain described herein may increase the cellular impedance of a barrier comprising IEC by at least at least about 0.001%, at least about 0.001%, at least about 0.01%, at least about 0.1%, at least about 1%, at least about 2%, at least about 3%, at least about 4%, at least about 5%, at least about 6%, at least about 7%, at least about 8%, at least about 9%, at least about 10%, at least about 20%, at least about 30%, at least about 40%, at least about 50%, at least about 60%, at least about 70%, at least about 80%, at least about 90%, at least about 100%, at least about 150%, at least about 2-fold, at least about 3-fold, at least about 4-fold, at least about 5-fold, at least about 6-fold, at least about 7-fold, at least about 8-fold, at least about 9-fold, at least about 10-fold, at least about 100-fold, at least about 1000-fold, at least about 10000-fold, at least about 100000-fold, or at least about 1000000-fold higher than that of a control. The control may comprise growing the infant gastrointestinal pathogen with a media control or without the bacterial strain (such as those described in EXAMPLE 3). In some cases, a bacterial strain described herein may increase the cellular impedance of a barrier comprising IEC by at most about 0.001%, at most about 0.001%, at most about 0.01%, at most about 0.1%, at most about 1%, at most about 2%, at most about 3%, at most about 4%, at most about 5%, at most about 6%, at most about 7%, at most about 8%, at most about 9%, at most about 10%, at most about 20%, at most about 30%, at most about 40%, at most about 50%, at most about 60%, at most about 70%, at most about 80%, at most about 90%, at most about 100%, at most about 150%, at most about 2-fold, at most about 3-fold, at most about 4-fold, at most about 5-fold, at most about 6-fold, at most about 7-fold, at most about 8-fold, at most about 9-fold, at most about 10-fold, at most about 100-fold, at most about 1000-fold, at most about 10000-fold, at most about 100000-fold, or at most about 1000000-fold higher than that of a control. A bacterial strain described herein (or the cultured medium thereof; or a bacterial product encompassed within that cultured medium) may not have a sufficient ability in increasing the integrity of a barrier comprising IEC.

[0232] A bacterial strain described herein may have a sufficient ability in utilizing an infant gastrointestinally relevant carbohydrate. An infant gastrointestinally relevant carbohydrate can comprise a carbohydrate present in an infant gastrointestinal tract. In some cases, the infant gastrointestinally relevant carbohydrate may comprise human milk oligosaccharides (HMOs). HMOs may comprise 2′-Fucosyllactose (2′FL), Lacto-N-difucohexaose I (LNDFH-I), Lacto-N-fucopentaose I (LNFP-I), Lacto-N-fucopentaose II (LNFP-II), Lacto-N-tetraose (LNT), 3-Fucosyllactose (3-FL), 6′-Sialyllactose (6′-SL), Disialyllacto-N-tetraose (DSLNT), Lacto-N-neotetraose (LNnT), Difucosyllactose (DFL), Fucosyldisialyllacto-N-hexose I (FDS-LNH), Lacto-N-fucopentaose III (LNFP-III), 3′-Sialyllactose (3′SL), or any combination thereof. In some cases, bacterial strain described herein may have a sufficient ability in utilizing HMOs as described herein. In some cases, bacterial strain described herein may have a sufficient ability in utilizing 2′FL. In some cases, bacterial strain described herein may have a sufficient ability in utilizing LNT. In some cases, bacterial strain described herein may have a sufficient ability in utilizing LNDFH-I. In some cases, bacterial strain described herein may have a sufficient ability in utilizing LNFP-I. In some cases, bacterial strain described herein may have a sufficient ability in utilizing LNFP-II. In some cases, bacterial strain described herein may have a sufficient ability in utilizing 3-FL. In some cases, bacterial strain described herein may have a sufficient ability in utilizing 6′-SL. In some cases, bacterial strain described herein may have a sufficient ability in utilizing DSLNT. In some cases, bacterial strain described herein may have a sufficient ability in utilizing LNnT. In some cases, bacterial strain described herein may have a sufficient ability in utilizing DFL. In some cases, bacterial strain described herein may have a sufficient ability in utilizing FDS-LNH. In some cases, bacterial strain described herein may have a sufficient ability in utilizing LNFP-III. In some cases, bacterial strain described herein may have a sufficient ability in utilizing 3′SL. A bacterial strain described herein may not have a sufficient ability in utilizing an infant gastrointestinally relevant carbohydrate.

[0233] In some cases, utilization of infant gastrointestinal-relevant can be measured by the growth ratio between the bacterial strain grown in a culture having a carbon source comprising the infant gastrointestinally relevant carbohydrate and the bacterial strain grown in a culture having a carbon source comprising glucose (referred to as infant gastrointestinally relevant carbohydrate growth ratio). For example, methods to determine the infant gastrointestinally relevant carbohydrate growth ratio are described herein, such as those described in EXAMPLE 3.

[0234] In some cases, the bacterial strain described herein may have an infant gastrointestinally relevant carbohydrate growth ratio of at least about 0.01, at least about 0.02, at least about 0.05, at least about 0.1, at least about 0.2, at least about 0.3, at least about 0.4, at least about 0.5, at least about 0.6, at least about 0.7, at least about 0.8, at least about 0.9, at least about 1, at least about 1.1, at least about 1.2, at least about 1.3, at least about 1.4, at least about 1.5, at least about 1.6, at least about 1.7, at least about 1.8, at least about 1.9, at least about 2, at least about 2.5, at least about 3, at least about 3.5, at least about 4, at least about 4.5, at least about 5 or more. In some cases, the bacterial strain described herein may have an infant gastrointestinally relevant carbohydrate growth ratio of at most about 0.01, at most about 0.02, at most about 0.05, at most about 0.1, at most about 0.2, at most about 0.3, at most about 0.4, at most about 0.5, at most about 0.6, at most about 0.7, at most about 0.8, at most about 0.9, at most about 1, at most about 1.1, at most about 1.2, at most about 1.3, at most about 1.4, at most about 1.5, at most about 1.6, at most about 1.7, at most about 1.8, at most about 1.9, at most about 2, at most about 2.5, at most about 3, at most about 3.5, at most about 4, at most about 4.5, or at most about 5.

[0235] In some cases, the bacterial strain described herein may have an infant gastrointestinally relevant carbohydrate growth ratio (for 2′FL) of at least about 0.01, at least about 0.02, at least about 0.05, at least about 0.1, at least about 0.2, at least about 0.3, at least about 0.4, at least about 0.5, at least about 0.6, at least about 0.7, at least about 0.8, at least about 0.9, at least about 1, at least about 1.1, at least about 1.2, at least about 1.3, at least about 1.4, at least about 1.5, at least about 1.6, at least about 1.7, at least about 1.8, at least about 1.9, at least about 2, at least about 2.5, at least about 3, at least about 3.5, at least about 4, at least about 4.5, at least about 5 or more. In some cases, the bacterial strain described herein may have an infant gastrointestinally relevant carbohydrate growth ratio (for 2′FL) of at most about 0.01, at most about 0.02, at most about 0.05, at most about 0.1, at most about 0.2, at most about 0.3, at most about 0.4, at most about 0.5, at most about 0.6, at most about 0.7, at most about 0.8, at most about 0.9, at most about 1, at most about 1.1, at most about 1.2, at most about 1.3, at most about 1.4, at most about 1.5, at most about 1.6, at most about 1.7, at most about 1.8, at most about 1.9, at most about 2, at most about 2.5, at most about 3, at most about 3.5, at most about 4, at most about 4.5, or at most about 5. In some cases, the bacterial strain described herein may have an infant gastrointestinally relevant carbohydrate growth ratio (for LNT) of at least about 0.01, at least about 0.02, at least about 0.05, at least about 0.1, at least about 0.2, at least about 0.3, at least about 0.4, at least about 0.5, at least about 0.6, at least about 0.7, at least about 0.8, at least about 0.9, at least about 1, at least about 1.1, at least about 1.2, at least about 1.3, at least about 1.4, at least about 1.5, at least about 1.6, at least about 1.7, at least about 1.8, at least about 1.9, at least about 2, at least about 2.5, at least about 3, at least about 3.5, at least about 4, at least about 4.5, at least about 5 or more. In some cases, the bacterial strain described herein may have an infant gastrointestinally relevant carbohydrate growth ratio (for LNT) of at most about 0.01, at most about 0.02, at most about 0.05, at most about 0.1, at most about 0.2, at most about 0.3, at most about 0.4, at most about 0.5, at most about 0.6, at most about 0.7, at most about 0.8, at most about 0.9, at most about 1, at most about 1.1, at most about 1.2, at most about 1.3, at most about 1.4, at most about 1.5, at most about 1.6, at most about 1.7, at most about 1.8, at most about 1.9, at most about 2, at most about 2.5, at most about 3, at most about 3.5, at most about 4, at most about 4.5, or at most about 5.

[0236] In some cases, the bacterial strain described herein may have an infant gastrointestinally relevant carbohydrate growth (for example, for 2′FL or LNT) ratio that is at least about 0.001%, at least about 0.001%, at least about 0.01%, at least about 0.1%, at least about 1%, at least about 2%, at least about 3%, at least about 4%, at least about 5%, at least about 6%, at least about 7%, at least about 8%, at least about 9%, at least about 10%, at least about 20%, at least about 30%, at least about 40%, at least about 50%, at least about 60%, at least about 70%, at least about 80%, at least about 90%, at least about 100%, at least about 150%, at least about 2-fold, at least about 3-fold, at least about 4-fold, at least about 5-fold, at least about 6-fold, at least about 7-fold, at least about 8-fold, at least about 9-fold, at least about 10-fold, at least about 100-fold, at least about 1000-fold, at least about 10000-fold, at least about 100000-fold, or at least about 1000000-fold higher than that of a control strain. In some cases, the bacterial strain described herein may have a vaginally relevant carbohydrate growth (for glycogen, bioglycogen, dextrin, or maltodextrin) ratio that is at most about 0.001%, at most about 0.001%, at most about 0.010%, at most about 0.1%, at most about 1%, at most about 2%, at most about 3%, at most about 4%, at most about 5%, at most about 6%, at most about 7%, at most about 8%, at most about 9%, at most about 10%, at most about 20%, at most about 30%, at most about 40%, at most about 50%, at most about 60%, at most about 70%, at most about 80%, at most about 90%, at most about 100%, at most about 150%, at most about 2-fold, at most about 3-fold, at most about 4-fold, at most about 5-fold, at most about 6-fold, at most about 7-fold, at most about 8-fold, at most about 9-fold, at most about 10-fold, at most about 100-fold, at most about 1000-fold, at most about 10000-fold, at most about 100000-fold, or at most about 1000000-fold higher than that of a control strain. The control strain may comprise EV27 or BG49.

[0237] A control composition or control formulation may comprise any control or control strain as described herein.

### Microbial Combinations

[0238] The bacterial population can comprise a plurality or at least two bacterial strains as described herein. The bacterial population can comprise a plurality or at least two bacterial species as described herein. The term “plurality” can comprise at 1, 2, 3, 4, 5, 6, 7, 8, 9, 10, or more. The plurality of bacterial strains can comprise any bacterial strains as descried herein. For a bacterial population comprising at least two bacterial strains, each of the at least two bacterial strains are different bacterial strains. In some cases, each of the at least two bacterial strains may comprise the bacterial species as described herein. In some cases, the bacterial population can comprise a plurality of bacterial strains of Bifidobacterium sp. or Lactobacillus sp. (or Vertebrate-Associated Lactobacillaceae). In some cases, the bacterial population can comprise a plurality of bacterial strains of Bifidobacterium adolescentis, Bifidobacterium bifidum, Bifidobacterium breve, Bifidobacterium longum, Bifidobacterium pseudocatenulatum, Lactobacillus crispatus, Lactobacillus gasseri, Lactobacillus jensenii, Lactobacillus plantarum, or Lactobacillus rhamnosus. A plurality of bacterial strains of Bifidobacterium adolescentis, Bifidobacterium bifidum, Bifidobacterium breve, Bifidobacterium longum, Bifidobacterium pseudocatenulatum, Lactobacillus crispatus, Lactobacillus gasseri, Lactobacillus jensenii, Lactobacillus plantarum, or Lactobacillus rhamnosus can comprise any individual bacterial strain or combinations of ST101, ST31, ST80, ST56, ST71, ST23, ST19, ST81, ST119, ST37, ST66, ST20, ST100, ST112, ST105, ST21, ST65, and/or ST116. In some cases, the bacterial population can comprise any of the aforementioned bacterial strains in addition to one or more additional bacterial strains from Bifidobacterium sp. or Lactobacillus sp. (or Vertebrate-Associated Lactobacillaceae).

[0239] The bacterial population can comprise any combinations of at least two bacterial strains of the following bacterial strains: a bacterial of Lactobacillus crispatus as described herein, a bacterial of Lactobacillus gasseri as described herein, a bacterial of Lactobacillus jensenii as described herein, a bacterial of Bifidobacterium bifidum as described herein, a bacterial of Lactobacillus plantarum as described herein, a bacterial of Bifidobacterium adolescentis as described herein, a bacterial of Bifidobacterium breve as described herein, a bacterial of Bifidobacterium longum as described herein, a bacterial of Bifidobacterium pseudocatenulatum as described herein, and/or a bacterial of Lactobacillus rhamnosus as described herein. The bacterial population can comprise any combinations of at least two bacterial strains of the following bacterial strains: a bacterial of Lactobacillus crispatus as described herein, a bacterial of Lactobacillus gasseri as described herein, and/or a bacterial of Lactobacillus jensenii as described herein. In some cases, the composition may be used for treating or preventing a disease or disease condition. A disease or disease condition may comprise a disease or complication associated with the disease. In some cases, the composition for treating or preventing a vaginal disease as described herein (e.g., BV or recurrent BV or a complication associated with the vaginal disease (e.g., pre-term birth, birth/pregnancy complications, STIs (such as HIV, Chlamydia, Gonorrhea, Suphilis, Trichomoniasis), pelvic inflammatory disease (PID), vulvovaginitis, or a combination thereof can comprise a bacterial population comprising any combinations of at least two bacterial strains of the following bacterial strains: a bacterial of Lactobacillus crispatus as described herein, a bacterial of Lactobacillus gasseri as described herein, and/or a bacterial of Lactobacillus jensenii as described herein. The bacterial population can comprise any combinations of at least two bacterial strains of the following bacterial strains: a bacterial of Bifidobacterium bifidum as described herein, a bacterial of Lactobacillus plantarum as described herein, a bacterial of Bifidobacterium adolescentis as described herein, a bacterial of Bifidobacterium breve as described herein, a bacterial of Bifidobacterium longum as described herein, a bacterial of Bifidobacterium pseudocatenulatum as described herein, and/or a bacterial of Lactobacillus rhamnosus as described herein. In some cases, the composition for treating or preventing an infant gastrointestinal disease as described herein (e.g., NEC, infectious gastroenteritis, neonatal cholestasis, or pediatric intestinal motility disorder) can comprise a bacterial population comprising any combinations of at least two bacterial strains of the following bacterial strains: a bacterial of Bifidobacterium bifidum as described herein, a bacterial of Lactobacillus plantarum as described herein, a bacterial of Bifidobacterium adolescentis as described herein, a bacterial of Bifidobacterium breve as described herein, a bacterial of Bifidobacterium longum as described herein, a bacterial of Bifidobacterium pseudocatenulatum as described herein, and/or a bacterial of Lactobacillus rhamnosus as described herein.

[0240] The bacterial population can comprise at least about 1, at least about 2, at least about 3, at least about 4, at least about 5, at least about 6, at least about 7, at least about 8, at least about 9, at least about 10, at least about 11, at least about 12, at least about 13, at least about 14, at least about 15, at least about 16, at least about 17, at least about 18, at least about 19, at least about 20 or more bacterial strain(s). The bacterial population can comprise at most about 1, at most about 2, at most about 3, at most about 4, at most about 5, at most about 6, at most about 7, at most about 8, at most about 9, at most about 10, at most about 11, at most about 12, at most about 13, at most about 14, at most about 15, at most about 16, at most about 17, at most about 18, at most about 19, or at most about 20 bacterial strain(s). The bacterial population can comprise at least about 1 bacterial strain. The bacterial population can comprise at least about 2 bacterial strains. The bacterial population can comprise at least about 3 bacterial strains. The bacterial population can comprise at least about 4 bacterial strains. The bacterial population can comprise at least about 5 bacterial strains. The bacterial population can comprise at least about 6 bacterial strains. The bacterial population can comprise at least about 7 bacterial strains. The bacterial population can comprise at least about 8 bacterial strains. The bacterial population can comprise at least about 9 bacterial strains. The bacterial population can comprise at least about 10 bacterial strains. The bacterial population can comprise at least about 11 bacterial strains. The bacterial population can comprise at least about 12 bacterial strains. The bacterial population can comprise at least about 13 bacterial strains. The bacterial population can comprise at least about 14 bacterial strains. The bacterial population can comprise at least about 15 bacterial strains. The bacterial population can comprise at least about 16 bacterial strains. The bacterial population can comprise at least about 17 bacterial strains. The bacterial population can comprise at least about bacterial strains. The bacterial population can comprise at least about 19 bacterial strains. The bacterial population can comprise at least about 20 bacterial strains. The bacterial population can comprise more than 20 bacterial strains. The bacterial population can comprise at most about 1 bacterial strain. The bacterial population can comprise at most about 2 bacterial strains. The bacterial population can comprise at most about 3 bacterial strains. The bacterial population can comprise at most about 4 bacterial strains. The bacterial population can comprise at most about 5 bacterial strains. The bacterial population can comprise at most about 6 bacterial strains. The bacterial population can comprise at most about 7 bacterial strains. The bacterial population can comprise at most about 8 bacterial strains. The bacterial population can comprise at most about 9 bacterial strains. The bacterial population can comprise at most about 10 bacterial strains. The bacterial population can comprise at most about 11 bacterial strains. The bacterial population can comprise at most about 12 bacterial strains. The bacterial population can comprise at most about 13 bacterial strains. The bacterial population can comprise at most about 14 bacterial strains. The bacterial population can comprise at most about 15 bacterial strains. The bacterial population can comprise at most about 16 bacterial strains. The bacterial population can comprise at most about 17 bacterial strains. The bacterial population can comprise at most about 18 bacterial strains. The bacterial population can comprise at most about 19 bacterial strains. The bacterial population can comprise at most about 20 bacterial strains. In some cases, the plurality of bacterial strains may not comprise strains from a same bacterial species. In some cases, the plurality of bacterial strains may comprise strains from a same bacterial species.

[0241] The bacterial population can comprise at least about 1, at least about 2, at least about 3, at least about 4, at least about 5, at least about 6, at least about 7, at least about 8, at least about 9, at least about 10, at least about 11, at least about 12, at least about 13, at least about 14, at least about 15, at least about 16, at least about 17, at least about 18, at least about 19, at least about 20 or more donor bacterial strain(s). The bacterial population can comprise at most about 1, at most about 2, at most about 3, at most about 4, at most about 5, at most about 6, at most about 7, at most about 8, at most about 9, at most about 10, at most about 11, at most about 12, at most about 13, at most about 14, at most about 15, at most about 16, at most about 17, at most about 18, at most about 19, or at most about 20 donor bacterial strain(s). The bacterial population can comprise at least about 1 donor bacterial strain. The bacterial population can comprise at least about 2 donor bacterial strains. The bacterial population can comprise at least about 3 donor bacterial strains. The bacterial population can comprise at least about 4 donor bacterial strains. The bacterial population can comprise at least about 5 donor bacterial strains. The bacterial population can comprise at least about 6 donor bacterial strains. The bacterial population can comprise at least about 7 donor bacterial strains. The bacterial population can comprise at least about 8 donor bacterial strains. The bacterial population can comprise at least about 9 donor bacterial strains. The bacterial population can comprise at least about 10 donor bacterial strains. The bacterial population can comprise at least about 11 donor bacterial strains. The bacterial population can comprise at least about 12 donor bacterial strains. The bacterial population can comprise at least about 13 donor bacterial strains. The bacterial population can comprise at least about 14 donor bacterial strains. The bacterial population can comprise at least about 15 donor bacterial strains. The bacterial population can comprise at least about 16 donor bacterial strains. The bacterial population can comprise at least about 17 donor bacterial strains. The bacterial population can comprise at least about 18 donor bacterial strains. The bacterial population can comprise at least about 19 donor bacterial strains. The bacterial population can comprise at least about 20 donor bacterial strains. The bacterial population can comprise more than 20 donor bacterial strains. The bacterial population can comprise at most about 1 donor bacterial strain. The bacterial population can comprise at most about 2 donor bacterial strains. The bacterial population can comprise at most about 3 donor bacterial strains. The bacterial population can comprise at most about 4 donor bacterial strains. The bacterial population can comprise at most about 5 donor bacterial strains. The bacterial population can comprise at most about 6 donor bacterial strains. The bacterial population can comprise at most about 7 donor bacterial strains. The bacterial population can comprise at most about 8 donor bacterial strains. The bacterial population can comprise at most about 9 donor bacterial strains. The bacterial population can comprise at most about 10 donor bacterial strains. The bacterial population can comprise at most about 11 donor bacterial strains. The bacterial population can comprise at most about 12 donor bacterial strains. The bacterial population can comprise at most about 13 donor bacterial strains. The bacterial population can comprise at most about 14 donor bacterial strains. The bacterial population can comprise at most about 15 donor bacterial strains. The bacterial population can comprise at most about 16 donor bacterial strains. The bacterial population can comprise at most about 17 donor bacterial strains. The bacterial population can comprise at most about 18 donor bacterial strains. The bacterial population can comprise at most about 19 donor bacterial strains. The bacterial population can comprise at most about 20 donor bacterial strains.

[0242] The bacterial population can comprise at least about 1, at least about 2, at least about 3, at least about 4, at least about 5, at least about 6, at least about 7, at least about 8, at least about 9, at least about 10, at least about 11, at least about 12, at least about 13, at least about 14, at least about 15, at least about 16, at least about 17, at least about 18, at least about 19, at least about 20 or more recipient bacterial strain(s). The bacterial population can comprise at most about 1, at most about 2, at most about 3, at most about 4, at most about 5, at most about 6, at most about 7, at most about 8, at most about 9, at most about 10, at most about 11, at most about 12, at most about 13, at most about 14, at most about 15, at most about 16, at most about 17, at most about 18, at most about 19, or at most about 20 recipient bacterial strain(s). The bacterial population can comprise at least about 1 recipient bacterial strain. The bacterial population can comprise at least about 2 recipient bacterial strains. The bacterial population can comprise at least about 3 recipient bacterial strains. The bacterial population can comprise at least about 4 recipient bacterial strains. The bacterial population can comprise at least about 5 recipient bacterial strains. The bacterial population can comprise at least about 6 recipient bacterial strains. The bacterial population can comprise at least about 7 recipient bacterial strains. The bacterial population can comprise at least about 8 recipient bacterial strains. The bacterial population can comprise at least about 9 recipient bacterial strains. The bacterial population can comprise at least about 10 recipient bacterial strains. The bacterial population can comprise at least about 11 recipient bacterial strains. The bacterial population can comprise at least about 12 recipient bacterial strains. The bacterial population can comprise at least about 13 recipient bacterial strains. The bacterial population can comprise at least about 14 recipient bacterial strains. The bacterial population can comprise at least about 15 recipient bacterial strains. The bacterial population can comprise at least about 16 recipient bacterial strains. The bacterial population can comprise at least about 17 recipient bacterial strains. The bacterial population can comprise at least about 18 recipient bacterial strains. The bacterial population can comprise at least about 19 recipient bacterial strains. The bacterial population can comprise at least about 20 recipient bacterial strains. The bacterial population can comprise more than 20 recipient bacterial strains. The bacterial population can comprise at most about 1 recipient bacterial strain. The bacterial population can comprise at most about 2 recipient bacterial strains. The bacterial population can comprise at most about 3 recipient bacterial strains. The bacterial population can comprise at most about 4 recipient bacterial strains. The bacterial population can comprise at most about 5 recipient bacterial strains. The bacterial population can comprise at most about 6 recipient bacterial strains. The bacterial population can comprise at most about 7 recipient bacterial strains. The bacterial population can comprise at most about 8 recipient bacterial strains. The bacterial population can comprise at most about 9 recipient bacterial strains. The bacterial population can comprise at most about 10 recipient bacterial strains. The bacterial population can comprise at most about 11 recipient bacterial strains. The bacterial population can comprise at most about 12 recipient bacterial strains. The bacterial population can comprise at most about 13 recipient bacterial strains. The bacterial population can comprise at most about 14 recipient bacterial strains. The bacterial population can comprise at most about 15 recipient bacterial strains. The bacterial population can comprise at most about 16 recipient bacterial strains. The bacterial population can comprise at most about 17 recipient bacterial strains. The bacterial population can comprise at most about 18 recipient bacterial strains. The bacterial population can comprise at most about 19 recipient bacterial strains. The bacterial population can comprise at most about 20 recipient bacterial strains.

[0243] A bacterial population can comprise ST100 and ST20. A bacterial population can comprise ST100 and ST112. A bacterial population can comprise ST100 and ST105. A bacterial population can comprise ST100 and ST21. A bacterial population can comprise ST100 and a bacterial strain of Lactobacillus crispatus. A bacterial population can comprise ST100 and a bacterial strain of Lactobacillus gasseri. A bacterial population can comprise ST100 and a bacterial strain of Lactobacillus jensenii. A bacterial population can comprise ST20 and ST112. A bacterial population can comprise ST20 and ST105. A bacterial population can comprise ST20 and ST21. A bacterial population can comprise ST20 and a bacterial strain of Lactobacillus crispatus. A bacterial population can comprise ST20 and a bacterial strain of Lactobacillus gasseri. A bacterial population can comprise ST20 and a bacterial strain of Lactobacillus jensenii. A bacterial population can comprise ST112 and ST105. A bacterial population can comprise ST112 and ST21. A bacterial population can comprise ST112 and a bacterial strain of Lactobacillus crispatus. A bacterial population can comprise ST112 and a bacterial strain of Lactobacillus gasseri. A bacterial population can comprise ST112 and a bacterial strain of Lactobacillus jensenii. A bacterial population can comprise ST105 and ST21. A bacterial population can comprise ST105 and a bacterial strain of Lactobacillus crispatus. A bacterial population can comprise ST105 and a bacterial strain of Lactobacillus gasseri. A bacterial population can comprise ST105 and a bacterial strain of Lactobacillus jensenii. A bacterial population can comprise ST21 and a bacterial strain of Lactobacillus crispatus. A bacterial population can comprise ST21 and a bacterial strain of Lactobacillus gasseri. A bacterial population can comprise ST21 and a bacterial strain of Lactobacillus jensenii. A bacterial population can comprise a bacterial strain of Lactobacillus crispatus and a bacterial strain of Lactobacillus gasseri. A bacterial population can comprise a bacterial strain of Lactobacillus crispatus and a bacterial strain of Lactobacillus jensenii. A bacterial population can comprise a bacterial strain of Lactobacillus gasseri and a bacterial strain of Lactobacillus jensenii.

[0244] A bacterial population can comprise ST100, ST20, and ST112. A bacterial population can comprise ST100, ST20, and ST105. A bacterial population can comprise ST100, ST20, and ST21. A bacterial population can comprise ST100, ST20, and a bacterial strain of Lactobacillus crispatus. A bacterial population can comprise ST100, ST20, and a bacterial strain of Lactobacillus gasseri. A bacterial population can comprise ST100, ST20, and a bacterial strain of Lactobacillus jensenii. A bacterial population can comprise ST100, ST112, and ST105. A bacterial population can comprise ST100, ST112, and ST21. A bacterial population can comprise ST100, ST112, and a bacterial strain of Lactobacillus crispatus. A bacterial population can comprise ST100, ST112, and a bacterial strain of Lactobacillus gasseri. A bacterial population can comprise ST100, ST112, and a bacterial strain of Lactobacillus jensenii. A bacterial population can comprise ST100, ST105, and ST21. A bacterial population can comprise ST100, ST105, and a bacterial strain of Lactobacillus crispatus. A bacterial population can comprise ST100, ST105, and a bacterial strain of Lactobacillus gasseri. A bacterial population can comprise ST100, ST105, and a bacterial strain of Lactobacillus jensenii. A bacterial population can comprise ST100, ST21, and a bacterial strain of Lactobacillus crispatus. A bacterial population can comprise ST100, ST21, and a bacterial strain of Lactobacillus gasseri. A bacterial population can comprise ST100, ST21, and a bacterial strain of Lactobacillus jensenii. A bacterial population can comprise ST100, a bacterial strain of Lactobacillus crispatus, and a bacterial strain of Lactobacillus gasseri. A bacterial population can comprise ST100, a bacterial strain of Lactobacillus crispatus, and a bacterial strain of Lactobacillus jensenii. A bacterial population can comprise ST100, a bacterial strain of Lactobacillus gasseri, and a bacterial strain of Lactobacillus jensenii. A bacterial population can comprise ST20, ST112, and ST105. A bacterial population can comprise ST20, ST112, and ST21. A bacterial population can comprise ST20, ST112, and a bacterial strain of Lactobacillus crispatus. A bacterial population can comprise ST20, ST112, and a bacterial strain of Lactobacillus gasseri. A bacterial population can comprise ST20, ST112, and a bacterial strain of Lactobacillus jensenii. A bacterial population can comprise ST20, ST105, and ST21. A bacterial population can comprise ST20, ST105, and a bacterial strain of Lactobacillus crispatus. A bacterial population can comprise ST20, ST105, and a bacterial strain of Lactobacillus gasseri. A bacterial population can comprise ST20, ST105, and a bacterial strain of Lactobacillus jensenii. A bacterial population can comprise ST20, ST21, and a bacterial strain of Lactobacillus crispatus. A bacterial population can comprise ST20, ST21, and a bacterial strain of Lactobacillus gasseri. A bacterial population can comprise ST20, ST21, and a bacterial strain of Lactobacillus jensenii. A bacterial population can comprise ST20, a bacterial strain of Lactobacillus crispatus, and a bacterial strain of Lactobacillus gasseri. A bacterial population can comprise ST20, a bacterial strain of Lactobacillus crispatus, and a bacterial strain of Lactobacillus jensenii. A bacterial population can comprise ST20, a bacterial strain of Lactobacillus gasseri, and a bacterial strain of Lactobacillus jensenii. A bacterial population can comprise ST112, ST105, and ST21. A bacterial population can comprise ST112, ST105, and a bacterial strain of Lactobacillus crispatus. A bacterial population can comprise ST112, ST105, and a bacterial strain of Lactobacillus gasseri. A bacterial population can comprise ST112, ST105, and a bacterial strain of Lactobacillus jensenii. A bacterial population can comprise ST112, ST21, and a bacterial strain of Lactobacillus crispatus. A bacterial population can comprise ST112, ST21, and a bacterial strain of Lactobacillus gasseri. A bacterial population can comprise ST112, ST21, and a bacterial strain of Lactobacillus jensenii. A bacterial population can comprise ST112, a bacterial strain of Lactobacillus crispatus, and a bacterial strain of Lactobacillus gasseri. A bacterial population can comprise ST112, a bacterial strain of Lactobacillus crispatus, and a bacterial strain of Lactobacillus jensenii. A bacterial population can comprise ST112, a bacterial strain of Lactobacillus gasseri, and a bacterial strain of Lactobacillus jensenii. A bacterial population can comprise ST105, ST21, and a bacterial strain of Lactobacillus crispatus. A bacterial population can comprise ST105, ST21, and a bacterial strain of Lactobacillus gasseri. A bacterial population can comprise ST105, ST21, and a bacterial strain of Lactobacillus jensenii. A bacterial population can comprise ST105, a bacterial strain of Lactobacillus crispatus, and a bacterial strain of Lactobacillus gasseri. A bacterial population can comprise ST105, a bacterial strain of Lactobacillus crispatus, and a bacterial strain of Lactobacillus jensenii. A bacterial population can comprise ST105, a bacterial strain of Lactobacillus gasseri, and a bacterial strain of Lactobacillus jensenii. A bacterial population can comprise ST21, a bacterial strain of Lactobacillus crispatus, and a bacterial strain of Lactobacillus gasseri. A bacterial population can comprise ST21, a bacterial strain of Lactobacillus crispatus, and a bacterial strain of Lactobacillus jensenii. A bacterial population can comprise ST21, a bacterial strain of Lactobacillus gasseri, and a bacterial strain of Lactobacillus jensenii. A bacterial population can comprise a bacterial strain of Lactobacillus crispatus, a bacterial strain of Lactobacillus gasseri, and a bacterial strain of Lactobacillus jensenii.

[0245] A bacterial population can comprise a bacterial strain of each of the following: Bifidobacterium bifidum and Lactobacillus plantarum. A bacterial population can comprise a bacterial strain of each of the following: Bifidobacterium bifidum and Bifidobacterium adolescentis. A bacterial population can comprise a bacterial strain of each of the following: Bifidobacterium bifidum and Bifidobacterium breve. A bacterial population can comprise a bacterial strain of each of the following: Bifidobacterium bifidum and Bifidobacterium longum. A bacterial population can comprise a bacterial strain of each of the following: Bifidobacterium bifidum and Bifidobacterium pseudocatenulatum. A bacterial population can comprise a bacterial strain of each of the following: Bifidobacterium bifidum and Lactobacillus rhamnosus. A bacterial population can comprise a bacterial strain of each of the following: Lactobacillus plantarum and Bifidobacterium adolescentis. A bacterial population can comprise a bacterial strain of each of the following: Lactobacillus plantarum and Bifidobacterium breve. A bacterial population can comprise a bacterial strain of each of the following: Lactobacillus plantarum and Bifidobacterium longum. A bacterial population can comprise a bacterial strain of each of the following: Lactobacillus plantarum and Bifidobacterium pseudocatenulatum. A bacterial population can comprise a bacterial strain of each of the following: Lactobacillus plantarum and Lactobacillus rhamnosus. A bacterial population can comprise a bacterial strain of each of the following: Bifidobacterium adolescentis and Bifidobacterium breve. A bacterial population can comprise a bacterial strain of each of the following: Bifidobacterium adolescentis and Bifidobacterium longum. A bacterial population can comprise a bacterial strain of each of the following: Bifidobacterium adolescentis and Bifidobacterium pseudocatenulatum. A bacterial population can comprise a bacterial strain of each of the following: Bifidobacterium adolescentis and Lactobacillus rhamnosus. A bacterial population can comprise a bacterial strain of each of the following: Bifidobacterium breve and Bifidobacterium longum. A bacterial population can comprise a bacterial strain of each of the following: Bifidobacterium breve and Bifidobacterium pseudocatenulatum. A bacterial population can comprise a bacterial strain of each of the following: Bifidobacterium breve and Lactobacillus rhamnosus. A bacterial population can comprise a bacterial strain of each of the following: Bifidobacterium longum and Bifidobacterium pseudocatenulatum. A bacterial population can comprise a bacterial strain of each of the following: Bifidobacterium longum and Lactobacillus rhamnosus. A bacterial population can comprise a bacterial strain of each of the following: Bifidobacterium pseudocatenulatum and Lactobacillus rhamnosus. A bacterial population can comprise a bacterial strain of each of the following: Bifidobacterium bifidum, Lactobacillus plantarum, and Bifidobacterium adolescentis. A bacterial population can comprise a bacterial strain of each of the following: Bifidobacterium bifidum, Lactobacillus plantarum, and Bifidobacterium breve. A bacterial population can comprise a bacterial strain of each of the following: Bifidobacterium bifidum, Lactobacillus plantarum, and Bifidobacterium longum. A bacterial population can comprise a bacterial strain of each of the following: Bifidobacterium bifidum, Lactobacillus plantarum, and Bifidobacterium pseudocatenulatum. A bacterial population can comprise a bacterial strain of each of the following: Bifidobacterium bifidum, Lactobacillus plantarum, and Lactobacillus rhamnosus. A bacterial population can comprise a bacterial strain of each of the following: Bifidobacterium bifidum, Bifidobacterium adolescentis, and Bifidobacterium breve. A bacterial population can comprise a bacterial strain of each of the following: Bifidobacterium bifidum, Bifidobacterium adolescentis, and Bifidobacterium longum. A bacterial population can comprise a bacterial strain of each of the following: Bifidobacterium bifidum, Bifidobacterium adolescentis, and Bifidobacterium pseudocatenulatum. A bacterial population can comprise a bacterial strain of each of the following: Bifidobacterium bifidum, Bifidobacterium adolescentis, and Lactobacillus rhamnosus. A bacterial population can comprise a bacterial strain of each of the following: Bifidobacterium bifidum, Bifidobacterium breve, and Bifidobacterium longum. A bacterial population can comprise a bacterial strain of each of the following: Bifidobacterium bifidum, Bifidobacterium breve, and Bifidobacterium pseudocatenulatum. A bacterial population can comprise a bacterial strain of each of the following: Bifidobacterium bifidum, Bifidobacterium breve, and Lactobacillus rhamnosus. A bacterial population can comprise a bacterial strain of each of the following: Bifidobacterium bifidum, Bifidobacterium longum, and Bifidobacterium pseudocatenulatum. A bacterial population can comprise a bacterial strain of each of the following: Bifidobacterium bifidum, Bifidobacterium longum, and Lactobacillus rhamnosus. A bacterial population can comprise a bacterial strain of each of the following: Bifidobacterium bifidum, Bifidobacterium pseudocatenulatum, and Lactobacillus rhamnosus. A bacterial population can comprise a bacterial strain of each of the following: Lactobacillus plantarum, Bifidobacterium adolescentis, and Bifidobacterium breve. A bacterial population can comprise a bacterial strain of each of the following: Lactobacillus plantarum, Bifidobacterium adolescentis, and Bifidobacterium longum. A bacterial population can comprise a bacterial strain of each of the following: Lactobacillus plantarum, Bifidobacterium adolescentis, and Bifidobacterium pseudocatenulatum. A bacterial population can comprise a bacterial strain of each of the following: Lactobacillus plantarum, Bifidobacterium adolescentis, and Lactobacillus rhamnosus. A bacterial population can comprise a bacterial strain of each of the following: Lactobacillus plantarum, Bifidobacterium breve, and Bifidobacterium longum. A bacterial population can comprise a bacterial strain of each of the following: Lactobacillus plantarum, Bifidobacterium breve, and Bifidobacterium pseudocatenulatum. A bacterial population can comprise a bacterial strain of each of the following: Lactobacillus plantarum, Bifidobacterium breve, and Lactobacillus rhamnosus. A bacterial population can comprise a bacterial strain of each of the following: Lactobacillus plantarum, Bifidobacterium longum, and Bifidobacterium pseudocatenulatum. A bacterial population can comprise a bacterial strain of each of the following: Lactobacillus plantarum, Bifidobacterium longum, and Lactobacillus rhamnosus. A bacterial population can comprise a bacterial strain of each of the following: Lactobacillus plantarum, Bifidobacterium pseudocatenulatum, and Lactobacillus rhamnosus. A bacterial population can comprise a bacterial strain of each of the following: Bifidobacterium adolescentis, Bifidobacterium breve, and Bifidobacterium longum. A bacterial population can comprise a bacterial strain of each of the following: Bifidobacterium adolescentis, Bifidobacterium breve, and Bifidobacterium pseudocatenulatum. A bacterial population can comprise a bacterial strain of each of the following: Bifidobacterium adolescentis, Bifidobacterium breve, and Lactobacillus rhamnosus. A bacterial population can comprise a bacterial strain of each of the following: Bifidobacterium adolescentis, Bifidobacterium longum, and Bifidobacterium pseudocatenulatum. A bacterial population can comprise a bacterial strain of each of the following: Bifidobacterium adolescentis, Bifidobacterium longum, and Lactobacillus rhamnosus. A bacterial population can comprise a bacterial strain of each of the following: Bifidobacterium adolescentis, Bifidobacterium pseudocatenulatum, and Lactobacillus rhamnosus. A bacterial population can comprise a bacterial strain of each of the following: Bifidobacterium breve, Bifidobacterium longum, and Bifidobacterium pseudocatenulatum. A bacterial population can comprise a bacterial strain of each of the following: Bifidobacterium breve, Bifidobacterium longum, and Lactobacillus rhamnosus. A bacterial population can comprise a bacterial strain of each of the following: Bifidobacterium breve, Bifidobacterium pseudocatenulatum, and Lactobacillus rhamnosus. A bacterial population can comprise a bacterial strain of each of the following: Bifidobacterium longum, Bifidobacterium pseudocatenulatum, and Lactobacillus rhamnosus. A bacterial population can comprise a bacterial strain of each of the following: Bifidobacterium bifidum, Lactobacillus plantarum, Bifidobacterium adolescentis, and Bifidobacterium breve. A bacterial population can comprise a bacterial strain of each of the following: Bifidobacterium bifidum, Lactobacillus plantarum, Bifidobacterium adolescentis, and Bifidobacterium longum. A bacterial population can comprise a bacterial strain of each of the following: Bifidobacterium bifidum, Lactobacillus plantarum, Bifidobacterium adolescentis, and Bifidobacterium pseudocatenulatum. A bacterial population can comprise a bacterial strain of each of the following: Bifidobacterium bifidum, Lactobacillus plantarum, Bifidobacterium adolescentis, and Lactobacillus rhamnosus. A bacterial population can comprise a bacterial strain of each of the following: Bifidobacterium bifidum, Lactobacillus plantarum, Bifidobacterium breve, and Bifidobacterium longum. A bacterial population can comprise a bacterial strain of each of the following: Bifidobacterium bifidum, Lactobacillus plantarum, Bifidobacterium breve, and Bifidobacterium pseudocatenulatum. A bacterial population can comprise a bacterial strain of each of the following: Bifidobacterium bifidum, Lactobacillus plantarum, Bifidobacterium breve, and Lactobacillus rhamnosus. A bacterial population can comprise a bacterial strain of each of the following: Bifidobacterium bifidum, Lactobacillus plantarum, Bifidobacterium longum, and Bifidobacterium pseudocatenulatum. A bacterial population can comprise a bacterial strain of each of the following: Bifidobacterium bifidum, Lactobacillus plantarum, Bifidobacterium longum, and Lactobacillus rhamnosus. A bacterial population can comprise a bacterial strain of each of the following: Bifidobacterium bifidum, Lactobacillus plantarum, Bifidobacterium pseudocatenulatum, and Lactobacillus rhamnosus. A bacterial population can comprise a bacterial strain of each of the following: Bifidobacterium bifidum, Bifidobacterium adolescentis, Bifidobacterium breve, and Bifidobacterium longum. A bacterial population can comprise a bacterial strain of each of the following: Bifidobacterium bifidum, Bifidobacterium adolescentis, Bifidobacterium breve, and Bifidobacterium pseudocatenulatum. A bacterial population can comprise a bacterial strain of each of the following: Bifidobacterium bifidum, Bifidobacterium adolescentis, Bifidobacterium breve, and Lactobacillus rhamnosus. A bacterial population can comprise a bacterial strain of each of the following: Bifidobacterium bifidum, Bifidobacterium adolescentis, Bifidobacterium longum, and Bifidobacterium pseudocatenulatum. A bacterial population can comprise a bacterial strain of each of the following: Bifidobacterium bifidum, Bifidobacterium adolescentis, Bifidobacterium longum, and Lactobacillus rhamnosus. A bacterial population can comprise a bacterial strain of each of the following: Bifidobacterium bifidum, Bifidobacterium adolescentis, Bifidobacterium pseudocatenulatum, and Lactobacillus rhamnosus. A bacterial population can comprise a bacterial strain of each of the following: Bifidobacterium bifidum, Bifidobacterium breve, Bifidobacterium longum, and Bifidobacterium pseudocatenulatum. A bacterial population can comprise a bacterial strain of each of the following: Bifidobacterium bifidum, Bifidobacterium breve, Bifidobacterium longum, and Lactobacillus rhamnosus. A bacterial population can comprise a bacterial strain of each of the following: Bifidobacterium bifidum, Bifidobacterium breve, Bifidobacterium pseudocatenulatum, and Lactobacillus rhamnosus. A bacterial population can comprise a bacterial strain of each of the following: Bifidobacterium bifidum, Bifidobacterium longum, Bifidobacterium pseudocatenulatum, and Lactobacillus rhamnosus. A bacterial population can comprise a bacterial strain of each of the following: Lactobacillus plantarum, Bifidobacterium adolescentis, Bifidobacterium breve, and Bifidobacterium longum. A bacterial population can comprise a bacterial strain of each of the following: Lactobacillus plantarum, Bifidobacterium adolescentis, Bifidobacterium breve, and Bifidobacterium pseudocatenulatum. A bacterial population can comprise a bacterial strain of each of the following: Lactobacillus plantarum, Bifidobacterium adolescentis, Bifidobacterium breve, and Lactobacillus rhamnosus. A bacterial population can comprise a bacterial strain of each of the following: Lactobacillus plantarum, Bifidobacterium adolescentis, Bifidobacterium longum, and Bifidobacterium pseudocatenulatum. A bacterial population can comprise a bacterial strain of each of the following: Lactobacillus plantarum, Bifidobacterium adolescentis, Bifidobacterium longum, and Lactobacillus rhamnosus. A bacterial population can comprise a bacterial strain of each of the following: Lactobacillus plantarum, Bifidobacterium adolescentis, Bifidobacterium pseudocatenulatum, and Lactobacillus rhamnosus. A bacterial population can comprise a bacterial strain of each of the following: Lactobacillus plantarum, Bifidobacterium breve, Bifidobacterium longum, and Bifidobacterium pseudocatenulatum. A bacterial population can comprise a bacterial strain of each of the following: Lactobacillus plantarum, Bifidobacterium breve, Bifidobacterium longum, and Lactobacillus rhamnosus. A bacterial population can comprise a bacterial strain of each of the following: Lactobacillus plantarum, Bifidobacterium breve, Bifidobacterium pseudocatenulatum, and Lactobacillus rhamnosus. A bacterial population can comprise a bacterial strain of each of the following: Lactobacillus plantarum, Bifidobacterium longum, Bifidobacterium pseudocatenulatum, and Lactobacillus rhamnosus. A bacterial population can comprise a bacterial strain of each of the following: Bifidobacterium adolescentis, Bifidobacterium breve, Bifidobacterium longum, and Bifidobacterium pseudocatenulatum. A bacterial population can comprise a bacterial strain of each of the following: Bifidobacterium adolescentis, Bifidobacterium breve, Bifidobacterium longum, and Lactobacillus rhamnosus. A bacterial population can comprise a bacterial strain of each of the following: Bifidobacterium adolescentis, Bifidobacterium breve, Bifidobacterium pseudocatenulatum, and Lactobacillus rhamnosus. A bacterial population can comprise a bacterial strain of each of the following: Bifidobacterium adolescentis, Bifidobacterium longum, Bifidobacterium pseudocatenulatum, and Lactobacillus rhamnosus. A bacterial population can comprise a bacterial strain of each of the following: Bifidobacterium breve, Bifidobacterium longum, Bifidobacterium pseudocatenulatum, and Lactobacillus rhamnosus.

[0246] A bacterial population can comprise ST31 and ST80. A bacterial population can comprise ST31 and ST65. A bacterial population can comprise ST31 and ST101. A bacterial population can comprise ST31 and ST56. A bacterial population can comprise ST31 and ST71. A bacterial population can comprise ST31 and ST19. A bacterial population can comprise ST31 and ST23. A bacterial population can comprise ST31 and ST81. A bacterial population can comprise ST31 and ST119. A bacterial population can comprise ST31 and ST37. A bacterial population can comprise ST31 and ST66. A bacterial population can comprise ST31 and ST116. A bacterial population can comprise ST80 and ST65. A bacterial population can comprise ST80 and ST101. A bacterial population can comprise ST80 and ST56. A bacterial population can comprise ST80 and ST71. A bacterial population can comprise ST80 and ST19. A bacterial population can comprise ST80 and ST23. A bacterial population can comprise ST80 and ST81. A bacterial population can comprise ST80 and ST119. A bacterial population can comprise ST80 and ST37. A bacterial population can comprise ST80 and ST66. A bacterial population can comprise ST80 and ST116. A bacterial population can comprise ST65 and ST101. A bacterial population can comprise ST65 and ST56. A bacterial population can comprise ST65 and ST71. A bacterial population can comprise ST65 and ST19. A bacterial population can comprise ST65 and ST23. A bacterial population can comprise ST65 and ST81. A bacterial population can comprise ST65 and ST119. A bacterial population can comprise ST65 and ST37. A bacterial population can comprise ST65 and ST66. A bacterial population can comprise ST65 and ST116. A bacterial population can comprise ST101 and ST56. A bacterial population can comprise ST101 and ST71. A bacterial population can comprise ST101 and ST19. A bacterial population can comprise ST101 and ST23. A bacterial population can comprise ST101 and ST81. A bacterial population can comprise ST101 and ST119. A bacterial population can comprise ST101 and ST37. A bacterial population can comprise ST101 and ST66. A bacterial population can comprise ST101 and ST116. A bacterial population can comprise ST56 and ST71. A bacterial population can comprise ST56 and ST19. A bacterial population can comprise ST56 and ST23. A bacterial population can comprise ST56 and ST81. A bacterial population can comprise ST56 and ST119. A bacterial population can comprise ST56 and ST37. A bacterial population can comprise ST56 and ST66. A bacterial population can comprise ST56 and ST116. A bacterial population can comprise ST71 and ST19. A bacterial population can comprise ST71 and ST23. A bacterial population can comprise ST71 and ST81. A bacterial population can comprise ST71 and ST119. A bacterial population can comprise ST71 and ST37. A bacterial population can comprise ST71 and ST66. A bacterial population can comprise ST71 and ST116. A bacterial population can comprise ST19 and ST23. A bacterial population can comprise ST19 and ST81. A bacterial population can comprise ST19 and ST119. A bacterial population can comprise ST19 and ST37. A bacterial population can comprise ST19 and ST66. A bacterial population can comprise ST19 and ST116. A bacterial population can comprise ST23 and ST81. A bacterial population can comprise ST23 and ST119. A bacterial population can comprise ST23 and ST37. A bacterial population can comprise ST23 and ST66. A bacterial population can comprise ST23 and ST116. A bacterial population can comprise ST81 and ST119. A bacterial population can comprise ST81 and ST37. A bacterial population can comprise ST81 and ST66. A bacterial population can comprise ST81 and ST116. A bacterial population can comprise ST119 and ST37. A bacterial population can comprise ST119 and ST66. A bacterial population can comprise ST119 and ST116. A bacterial population can comprise ST37 and ST66. A bacterial population can comprise ST37 and ST116. A bacterial population can comprise ST66 and ST116. A bacterial population can comprise ST31, ST80, and ST65. A bacterial population can comprise ST31, ST80, and ST101. A bacterial population can comprise ST31, ST80, and ST56. A bacterial population can comprise ST31, ST80, and ST71. A bacterial population can comprise ST31, ST80, and ST19. A bacterial population can comprise ST31, ST80, and ST23. A bacterial population can comprise ST31, ST80, and ST81. A bacterial population can comprise ST31, ST80, and ST119. A bacterial population can comprise ST31, ST80, and ST37. A bacterial population can comprise ST31, ST80, and ST66. A bacterial population can comprise ST31, ST80, and ST116. A bacterial population can comprise ST31, ST65, and ST101. A bacterial population can comprise ST31, ST65, and ST56. A bacterial population can comprise ST31, ST65, and ST71. A bacterial population can comprise ST31, ST65, and ST19. A bacterial population can comprise ST31, ST65, and ST23. A bacterial population can comprise ST31, ST65, and ST81. A bacterial population can comprise ST31, ST65, and ST119. A bacterial population can comprise ST31, ST65, and ST37. A bacterial population can comprise ST31, ST65, and ST66. A bacterial population can comprise ST31, ST65, and ST116. A bacterial population can comprise ST31, ST101, and ST56. A bacterial population can comprise ST31, ST101, and ST71. A bacterial population can comprise ST31, ST101, and ST19. A bacterial population can comprise ST31, ST101, and ST23. A bacterial population can comprise ST31, ST101, and ST81. A bacterial population can comprise ST31, ST101, and ST119. A bacterial population can comprise ST31, ST101, and ST37. A bacterial population can comprise ST31, ST101, and ST66. A bacterial population can comprise ST31, ST101, and ST116. A bacterial population can comprise ST31, ST56, and ST71. A bacterial population can comprise ST31, ST56, and ST19. A bacterial population can comprise ST31, ST56, and ST23. A bacterial population can comprise ST31, ST56, and ST81. A bacterial population can comprise ST31, ST56, and ST119. A bacterial population can comprise ST31, ST56, and ST37. A bacterial population can comprise ST31, ST56, and ST66. A bacterial population can comprise ST31, ST56, and ST116. A bacterial population can comprise ST31, ST71, and ST19. A bacterial population can comprise ST31, ST71, and ST23. A bacterial population can comprise ST31, ST71, and ST81. A bacterial population can comprise ST31, ST71, and ST119. A bacterial population can comprise ST31, ST71, and ST37. A bacterial population can comprise ST31, ST71, and ST66. A bacterial population can comprise ST31, ST71, and ST116. A bacterial population can comprise ST31, ST19, and ST23. A bacterial population can comprise ST31, ST19, and ST81. A bacterial population can comprise ST31, ST19, and ST119. A bacterial population can comprise ST31, ST19, and ST37. A bacterial population can comprise ST31, ST19, and ST66. A bacterial population can comprise ST31, ST19, and ST116. A bacterial population can comprise ST31, ST23, and ST81. A bacterial population can comprise ST31, ST23, and ST119. A bacterial population can comprise ST31, ST23, and ST37. A bacterial population can comprise ST31, ST23, and ST66. A bacterial population can comprise ST31, ST23, and ST116. A bacterial population can comprise ST31, ST81, and ST119. A bacterial population can comprise ST31, ST81, and ST37. A bacterial population can comprise ST31, ST81, and ST66. A bacterial population can comprise ST31, ST81, and ST116. A bacterial population can comprise ST31, ST119, and ST37. A bacterial population can comprise ST31, ST119, and ST66. A bacterial population can comprise ST31, ST119, and ST116. A bacterial population can comprise ST31, ST37, and ST66. A bacterial population can comprise ST31, ST37, and ST116. A bacterial population can comprise ST31, ST66, and ST116. A bacterial population can comprise ST80, ST65, and ST101. A bacterial population can comprise ST80, ST65, and ST56. A bacterial population can comprise ST80, ST65, and ST71. A bacterial population can comprise ST80, ST65, and ST19. A bacterial population can comprise ST80, ST65, and ST23. A bacterial population can comprise ST80, ST65, and ST81. A bacterial population can comprise ST80, ST65, and ST119. A bacterial population can comprise ST80, ST65, and ST37. A bacterial population can comprise ST80, ST65, and ST66. A bacterial population can comprise ST80, ST65, and ST116. A bacterial population can comprise ST80, ST101, and ST56. A bacterial population can comprise ST80, ST101, and ST71. A bacterial population can comprise ST80, ST101, and ST19. A bacterial population can comprise ST80, ST101, and ST23. A bacterial population can comprise ST80, ST101, and ST81. A bacterial population can comprise ST80, ST101, and ST119. A bacterial population can comprise ST80, ST101, and ST37. A bacterial population can comprise ST80, ST101, and ST66. A bacterial population can comprise ST80, ST101, and ST116. A bacterial population can comprise ST80, ST56, and ST71. A bacterial population can comprise ST80, ST56, and ST19. A bacterial population can comprise ST80, ST56, and ST23. A bacterial population can comprise ST80, ST56, and ST81. A bacterial population can comprise ST80, ST56, and ST119. A bacterial population can comprise ST80, ST56, and ST37. A bacterial population can comprise ST80, ST56, and ST66. A bacterial population can comprise ST80, ST56, and ST116. A bacterial population can comprise ST80, ST71, and ST19. A bacterial population can comprise ST80, ST71, and ST23. A bacterial population can comprise ST80, ST71, and ST81. A bacterial population can comprise ST80, ST71, and ST119. A bacterial population can comprise ST80, ST71, and ST37. A bacterial population can comprise ST80, ST71, and ST66. A bacterial population can comprise ST80, ST71, and ST116. A bacterial population can comprise ST80, ST19, and ST23. A bacterial population can comprise ST80, ST19, and ST81. A bacterial population can comprise ST80, ST19, and ST119. A bacterial population can comprise ST80, ST19, and ST37. A bacterial population can comprise ST80, ST19, and ST66. A bacterial population can comprise ST80, ST19, and ST116. A bacterial population can comprise ST80, ST23, and ST81. A bacterial population can comprise ST80, ST23, and ST119. A bacterial population can comprise ST80, ST23, and ST37. A bacterial population can comprise ST80, ST23, and ST66. A bacterial population can comprise ST80, ST23, and ST116. A bacterial population can comprise ST80, ST81, and ST119. A bacterial population can comprise ST80, ST81, and ST37. A bacterial population can comprise ST80, ST81, and ST66. A bacterial population can comprise ST80, ST81, and ST116. A bacterial population can comprise ST80, ST119, and ST37. A bacterial population can comprise ST80, ST119, and ST66. A bacterial population can comprise ST80, ST119, and ST116. A bacterial population can comprise ST80, ST37, and ST66. A bacterial population can comprise ST80, ST37, and ST116. A bacterial population can comprise ST80, ST66, and ST116. A bacterial population can comprise ST65, ST101, and ST56. A bacterial population can comprise ST65, ST101, and ST71. A bacterial population can comprise ST65, ST101, and ST19. A bacterial population can comprise ST65, ST101, and ST23. A bacterial population can comprise ST65, ST101, and ST81. A bacterial population can comprise ST65, ST101, and ST119. A bacterial population can comprise ST65, ST101, and ST37. A bacterial population can comprise ST65, ST101, and ST66. A bacterial population can comprise ST65, ST101, and ST116. A bacterial population can comprise ST65, ST56, and ST71. A bacterial population can comprise ST65, ST56, and ST19. A bacterial population can comprise ST65, ST56, and ST23. A bacterial population can comprise ST65, ST56, and ST81. A bacterial population can comprise ST65, ST56, and ST119. A bacterial population can comprise ST65, ST56, and ST37. A bacterial population can comprise ST65, ST56, and ST66. A bacterial population can comprise ST65, ST56, and ST116. A bacterial population can comprise ST65, ST71, and ST19. A bacterial population can comprise ST65, ST71, and ST23. A bacterial population can comprise ST65, ST71, and ST81. A bacterial population can comprise ST65, ST71, and ST119. A bacterial population can comprise ST65, ST71, and ST37. A bacterial population can comprise ST65, ST71, and ST66. A bacterial population can comprise ST65, ST71, and ST116. A bacterial population can comprise ST65, ST19, and ST23. A bacterial population can comprise ST65, ST19, and ST81. A bacterial population can comprise ST65, ST19, and ST119. A bacterial population can comprise ST65, ST19, and ST37. A bacterial population can comprise ST65, ST19, and ST66. A bacterial population can comprise ST65, ST19, and ST116. A bacterial population can comprise ST65, ST23, and ST81. A bacterial population can comprise ST65, ST23, and ST119. A bacterial population can comprise ST65, ST23, and ST37. A bacterial population can comprise ST65, ST23, and ST66. A bacterial population can comprise ST65, ST23, and ST116. A bacterial population can comprise ST65, ST81, and ST119. A bacterial population can comprise ST65, ST81, and ST37. A bacterial population can comprise ST65, ST81, and ST66. A bacterial population can comprise ST65, ST81, and ST116. A bacterial population can comprise ST65, ST119, and ST37. A bacterial population can comprise ST65, ST119, and ST66. A bacterial population can comprise ST65, ST119, and ST116. A bacterial population can comprise ST65, ST37, and ST66. A bacterial population can comprise ST65, ST37, and ST116. A bacterial population can comprise ST65, ST66, and ST116. A bacterial population can comprise ST101, ST56, and ST71. A bacterial population can comprise ST101, ST56, and ST19. A bacterial population can comprise ST101, ST56, and ST23. A bacterial population can comprise ST101, ST56, and ST81. A bacterial population can comprise ST101, ST56, and ST119. A bacterial population can comprise ST101, ST56, and ST37. A bacterial population can comprise ST101, ST56, and ST66. A bacterial population can comprise ST101, ST56, and ST116. A bacterial population can comprise ST101, ST71, and ST19. A bacterial population can comprise ST101, ST71, and ST23. A bacterial population can comprise ST101, ST71, and ST81. A bacterial population can comprise ST101, ST71, and ST119. A bacterial population can comprise ST101, ST71, and ST37. A bacterial population can comprise ST101, ST71, and ST66. A bacterial population can comprise ST101, ST71, and ST116. A bacterial population can comprise ST101, ST19, and ST23. A bacterial population can comprise ST101, ST19, and ST81. A bacterial population can comprise ST101, ST19, and ST119. A bacterial population can comprise ST101, ST19, and ST37. A bacterial population can comprise ST101, ST19, and ST66. A bacterial population can comprise ST101, ST19, and ST116. A bacterial population can comprise ST101, ST23, and ST81. A bacterial population can comprise ST101, ST23, and ST119. A bacterial population can comprise ST101, ST23, and ST37. A bacterial population can comprise ST101, ST23, and ST66. A bacterial population can comprise ST101, ST23, and ST116. A bacterial population can comprise ST101, ST81, and ST119. A bacterial population can comprise ST101, ST81, and ST37. A bacterial population can comprise ST101, ST81, and ST66. A bacterial population can comprise ST101, ST81, and ST116. A bacterial population can comprise ST101, ST119, and ST37. A bacterial population can comprise ST101, ST119, and ST66. A bacterial population can comprise ST101, ST119, and ST116. A bacterial population can comprise ST101, ST37, and ST66. A bacterial population can comprise ST101, ST37, and ST116. A bacterial population can comprise ST101, ST66, and ST116. A bacterial population can comprise ST56, ST71, and ST19. A bacterial population can comprise ST56, ST71, and ST23. A bacterial population can comprise ST56, ST71, and ST81. A bacterial population can comprise ST56, ST71, and ST119. A bacterial population can comprise ST56, ST71, and ST37. A bacterial population can comprise ST56, ST71, and ST66. A bacterial population can comprise ST56, ST71, and ST116. A bacterial population can comprise ST56, ST19, and ST23. A bacterial population can comprise ST56, ST19, and ST81. A bacterial population can comprise ST56, ST19, and ST119. A bacterial population can comprise ST56, ST19, and ST37. A bacterial population can comprise ST56, ST19, and ST66. A bacterial population can comprise ST56, ST19, and ST116. A bacterial population can comprise ST56, ST23, and ST81. A bacterial population can comprise ST56, ST23, and ST119. A bacterial population can comprise ST56, ST23, and ST37. A bacterial population can comprise ST56, ST23, and ST66. A bacterial population can comprise ST56, ST23, and ST116. A bacterial population can comprise ST56, ST81, and ST119. A bacterial population can comprise ST56, ST81, and ST37. A bacterial population can comprise ST56, ST81, and ST66. A bacterial population can comprise ST56, ST81, and ST116. A bacterial population can comprise ST56, ST119, and ST37. A bacterial population can comprise ST56, ST119, and ST66. A bacterial population can comprise ST56, ST119, and ST116. A bacterial population can comprise ST56, ST37, and ST66. A bacterial population can comprise ST56, ST37, and ST116. A bacterial population can comprise ST56, ST66, and ST116. A bacterial population can comprise ST71, ST19, and ST23. A bacterial population can comprise ST71, ST19, and ST81. A bacterial population can comprise ST71, ST19, and ST119. A bacterial population can comprise ST71, ST19, and ST37. A bacterial population can comprise ST71, ST19, and ST66. A bacterial population can comprise ST71, ST19, and ST116. A bacterial population can comprise ST71, ST23, and ST81. A bacterial population can comprise ST71, ST23, and ST119. A bacterial population can comprise ST71, ST23, and ST37. A bacterial population can comprise ST71, ST23, and ST66. A bacterial population can comprise ST71, ST23, and ST116. A bacterial population can comprise ST71, ST81, and ST119. A bacterial population can comprise ST71, ST81, and ST37. A bacterial population can comprise ST71, ST81, and ST66. A bacterial population can comprise ST71, ST81, and ST116. A bacterial population can comprise ST71, ST119, and ST37. A bacterial population can comprise ST71, ST119, and ST66. A bacterial population can comprise ST71, ST119, and ST116. A bacterial population can comprise ST71, ST37, and ST66. A bacterial population can comprise ST71, ST37, and ST116. A bacterial population can comprise ST71, ST66, and ST116. A bacterial population can comprise ST19, ST23, and ST81. A bacterial population can comprise ST19, ST23, and ST119. A bacterial population can comprise ST19, ST23, and ST37. A bacterial population can comprise ST19, ST23, and ST66. A bacterial population can comprise ST19, ST23, and ST116. A bacterial population can comprise ST19, ST81, and ST119. A bacterial population can comprise ST19, ST81, and ST37. A bacterial population can comprise ST19, ST81, and ST66. A bacterial population can comprise ST19, ST81, and ST116. A bacterial population can comprise ST19, ST119, and ST37. A bacterial population can comprise ST19, ST119, and ST66. A bacterial population can comprise ST19, ST119, and ST116. A bacterial population can comprise ST19, ST37, and ST66. A bacterial population can comprise ST19, ST37, and ST116. A bacterial population can comprise ST19, ST66, and ST116. A bacterial population can comprise ST23, ST81, and ST119. A bacterial population can comprise ST23, ST81, and ST37. A bacterial population can comprise ST23, ST81, and ST66. A bacterial population can comprise ST23, ST81, and ST116. A bacterial population can comprise ST23, ST119, and ST37. A bacterial population can comprise ST23, ST119, and ST66. A bacterial population can comprise ST23, ST119, and ST116. A bacterial population can comprise ST23, ST37, and ST66. A bacterial population can comprise ST23, ST37, and ST116. A bacterial population can comprise ST23, ST66, and ST116. A bacterial population can comprise ST81, ST119, and ST37. A bacterial population can comprise ST81, ST119, and ST66. A bacterial population can comprise ST81, ST119, and ST116. A bacterial population can comprise ST81, ST37, and ST66. A bacterial population can comprise ST81, ST37, and ST116. A bacterial population can comprise ST81, ST66, and ST116. A bacterial population can comprise ST119, ST37, and ST66. A bacterial population can comprise ST119, ST37, and ST116. A bacterial population can comprise ST119, ST66, and ST116. A bacterial population can comprise ST37, ST66, and ST116. A bacterial population can comprise ST31, ST80, ST65, and ST101. A bacterial population can comprise ST31, ST80, ST65, and ST56. A bacterial population can comprise ST31, ST80, ST65, and ST71. A bacterial population can comprise ST31, ST80, ST65, and ST19. A bacterial population can comprise ST31, ST80, ST65, and ST23. A bacterial population can comprise ST31, ST80, ST65, and ST81. A bacterial population can comprise ST31, ST80, ST65, and ST119. A bacterial population can comprise ST31, ST80, ST65, and ST37. A bacterial population can comprise ST31, ST80, ST65, and ST66. A bacterial population can comprise ST31, ST80, ST65, and ST116. A bacterial population can comprise ST31, ST80, ST101, and ST56. A bacterial population can comprise ST31, ST80, ST101, and ST71. A bacterial population can comprise ST31, ST80, ST101, and ST19. A bacterial population can comprise ST31, ST80, ST101, and ST23. A bacterial population can comprise ST31, ST80, ST101, and ST81. A bacterial population can comprise ST31, ST80, ST101, and ST119. A bacterial population can comprise ST31, ST80, ST101, and ST37. A bacterial population can comprise ST31, ST80, ST101, and ST66. A bacterial population can comprise ST31, ST80, ST101, and ST116. A bacterial population can comprise ST31, ST80, ST56, and ST71. A bacterial population can comprise ST31, ST80, ST56, and ST19. A bacterial population can comprise ST31, ST80, ST56, and ST23. A bacterial population can comprise ST31, ST80, ST56, and ST81. A bacterial population can comprise ST31, ST80, ST56, and ST119. A bacterial population can comprise ST31, ST80, ST56, and ST37. A bacterial population can comprise ST31, ST80, ST56, and ST66. A bacterial population can comprise ST31, ST80, ST56, and ST116. A bacterial population can comprise ST31, ST80, ST71, and ST19. A bacterial population can comprise ST31, ST80, ST71, and ST23. A bacterial population can comprise ST31, ST80, ST71, and ST81. A bacterial population can comprise ST31, ST80, ST71, and ST119. A bacterial population can comprise ST31, ST80, ST71, and ST37. A bacterial population can comprise ST31, ST80, ST71, and ST66. A bacterial population can comprise ST31, ST80, ST71, and ST116. A bacterial population can comprise ST31, ST80, ST19, and ST23. A bacterial population can comprise ST31, ST80, ST19, and ST81. A bacterial population can comprise ST31, ST80, ST19, and ST119. A bacterial population can comprise ST31, ST80, ST19, and ST37. A bacterial population can comprise ST31, ST80, ST19, and ST66. A bacterial population can comprise ST31, ST80, ST19, and ST116. A bacterial population can comprise ST31, ST80, ST23, and ST81. A bacterial population can comprise ST31, ST80, ST23, and ST119. A bacterial population can comprise ST31, ST80, ST23, and ST37. A bacterial population can comprise ST31, ST80, ST23, and ST66. A bacterial population can comprise ST31, ST80, ST23, and ST116. A bacterial population can comprise ST31, ST80, ST81, and ST119. A bacterial population can comprise ST31, ST80, ST81, and ST37. A bacterial population can comprise ST31, ST80, ST81, and ST66. A bacterial population can comprise ST31, ST80, ST81, and ST116. A bacterial population can comprise ST31, ST80, ST119, and ST37. A bacterial population can comprise ST31, ST80, ST119, and ST66. A bacterial population can comprise ST31, ST80, ST119, and ST116. A bacterial population can comprise ST31, ST80, ST37, and ST66. A bacterial population can comprise ST31, ST80, ST37, and ST116. A bacterial population can comprise ST31, ST80, ST66, and ST116. A bacterial population can comprise ST31, ST65, ST101, and ST56. A bacterial population can comprise ST31, ST65, ST101, and ST71. A bacterial population can comprise ST31, ST65, ST101, and ST19. A bacterial population can comprise ST31, ST65, ST101, and ST23. A bacterial population can comprise ST31, ST65, ST101, and ST81. A bacterial population can comprise ST31, ST65, ST101, and ST119. A bacterial population can comprise ST31, ST65, ST101, and ST37. A bacterial population can comprise ST31, ST65, ST101, and ST66. A bacterial population can comprise ST31, ST65, ST101, and ST116. A bacterial population can comprise ST31, ST65, ST56, and ST71. A bacterial population can comprise ST31, ST65, ST56, and ST19. A bacterial population can comprise ST31, ST65, ST56, and ST23. A bacterial population can comprise ST31, ST65, ST56, and ST81. A bacterial population can comprise ST31, ST65, ST56, and ST119. A bacterial population can comprise ST31, ST65, ST56, and ST37. A bacterial population can comprise ST31, ST65, ST56, and ST66. A bacterial population can comprise ST31, ST65, ST56, and ST116. A bacterial population can comprise ST31, ST65, ST71, and ST19. A bacterial population can comprise ST31, ST65, ST71, and ST23. A bacterial population can comprise ST31, ST65, ST71, and ST81. A bacterial population can comprise ST31, ST65, ST71, and ST119. A bacterial population can comprise ST31, ST65, ST71, and ST37. A bacterial population can comprise ST31, ST65, ST71, and ST66. A bacterial population can comprise ST31, ST65, ST71, and ST116. A bacterial population can comprise ST31, ST65, ST19, and ST23. A bacterial population can comprise ST31, ST65, ST19, and ST81. A bacterial population can comprise ST31, ST65, ST19, and ST119. A bacterial population can comprise ST31, ST65, ST19, and ST37. A bacterial population can comprise ST31, ST65, ST19, and ST66. A bacterial population can comprise ST31, ST65, ST19, and ST116. A bacterial population can comprise ST31, ST65, ST23, and ST81. A bacterial population can comprise ST31, ST65, ST23, and ST119. A bacterial population can comprise ST31, ST65, ST23, and ST37. A bacterial population can comprise ST31, ST65, ST23, and ST66. A bacterial population can comprise ST31, ST65, ST23, and ST116. A bacterial population can comprise ST31, ST65, ST81, and ST119. A bacterial population can comprise ST31, ST65, ST81, and ST37. A bacterial population can comprise ST31, ST65, ST81, and ST66. A bacterial population can comprise ST31, ST65, ST81, and ST116. A bacterial population can comprise ST31, ST65, ST119, and ST37. A bacterial population can comprise ST31, ST65, ST119, and ST66. A bacterial population can comprise ST31, ST65, ST119, and ST116. A bacterial population can comprise ST31, ST65, ST37, and ST66. A bacterial population can comprise ST31, ST65, ST37, and ST116. A bacterial population can comprise ST31, ST65, ST66, and ST116. A bacterial population can comprise ST31, ST101, ST56, and ST71. A bacterial population can comprise ST31, ST101, ST56, and ST19. A bacterial population can comprise ST31, ST101, ST56, and ST23. A bacterial population can comprise ST31, ST101, ST56, and ST81. A bacterial population can comprise ST31, ST101, ST56, and ST119. A bacterial population can comprise ST31, ST101, ST56, and ST37. A bacterial population can comprise ST31, ST101, ST56, and ST66. A bacterial population can comprise ST31, ST101, ST56, and ST116. A bacterial population can comprise ST31, ST101, ST71, and ST19. A bacterial population can comprise ST31, ST101, ST71, and ST23. A bacterial population can comprise ST31, ST101, ST71, and ST81. A bacterial population can comprise ST31, ST101, ST71, and ST119. A bacterial population can comprise ST31, ST101, ST71, and ST37. A bacterial population can comprise ST31, ST101, ST71, and ST66. A bacterial population can comprise ST31, ST101, ST71, and ST116. A bacterial population can comprise ST31, ST101, ST19, and ST23. A bacterial population can comprise ST31, ST101, ST19, and ST81. A bacterial population can comprise ST31, ST101, ST19, and ST119. A bacterial population can comprise ST31, ST101, ST19, and ST37. A bacterial population can comprise ST31, ST101, ST19, and ST66. A bacterial population can comprise ST31, ST101, ST19, and ST116. A bacterial population can comprise ST31, ST101, ST23, and ST81. A bacterial population can comprise ST31, ST101, ST23, and ST119. A bacterial population can comprise ST31, ST101, ST23, and ST37. A bacterial population can comprise ST31, ST101, ST23, and ST66. A bacterial population can comprise ST31, ST101, ST23, and ST116. A bacterial population can comprise ST31, ST101, ST81, and ST119. A bacterial population can comprise ST31, ST101, ST81, and ST37. A bacterial population can comprise ST31, ST101, ST81, and ST66. A bacterial population can comprise ST31, ST101, ST81, and ST116. A bacterial population can comprise ST31, ST101, ST119, and ST37. A bacterial population can comprise ST31, ST101, ST119, and ST66. A bacterial population can comprise ST31, ST101, ST119, and ST116. A bacterial population can comprise ST31, ST101, ST37, and ST66. A bacterial population can comprise ST31, ST101, ST37, and ST116. A bacterial population can comprise ST31, ST101, ST66, and ST116. A bacterial population can comprise ST31, ST56, ST71, and ST19. A bacterial population can comprise ST31, ST56, ST71, and ST23. A bacterial population can comprise ST31, ST56, ST71, and ST81. A bacterial population can comprise ST31, ST56, ST71, and ST119. A bacterial population can comprise ST31, ST56, ST71, and ST37. A bacterial population can comprise ST31, ST56, ST71, and ST66. A bacterial population can comprise ST31, ST56, ST71, and ST116. A bacterial population can comprise ST31, ST56, ST19, and ST23. A bacterial population can comprise ST31, ST56, ST19, and ST81. A bacterial population can comprise ST31, ST56, ST19, and ST119. A bacterial population can comprise ST31, ST56, ST19, and ST37. A bacterial population can comprise ST31, ST56, ST19, and ST66. A bacterial population can comprise ST31, ST56, ST19, and ST116. A bacterial population can comprise ST31, ST56, ST23, and ST81. A bacterial population can comprise ST31, ST56, ST23, and ST119. A bacterial population can comprise ST31, ST56, ST23, and ST37. A bacterial population can comprise ST31, ST56, ST23, and ST66. A bacterial population can comprise ST31, ST56, ST23, and ST116. A bacterial population can comprise ST31, ST56, ST81, and ST119. A bacterial population can comprise ST31, ST56, ST81, and ST37. A bacterial population can comprise ST31, ST56, ST81, and ST66. A bacterial population can comprise ST31, ST56, ST81, and ST116. A bacterial population can comprise ST31, ST56, ST119, and ST37. A bacterial population can comprise ST31, ST56, ST119, and ST66. A bacterial population can comprise ST31, ST56, ST119, and ST116. A bacterial population can comprise ST31, ST56, ST37, and ST66. A bacterial population can comprise ST31, ST56, ST37, and ST116. A bacterial population can comprise ST31, ST56, ST66, and ST116. A bacterial population can comprise ST31, ST71, ST19, and ST23. A bacterial population can comprise ST31, ST71, ST19, and ST81. A bacterial population can comprise ST31, ST71, ST19, and ST119. A bacterial population can comprise ST31, ST71, ST19, and ST37. A bacterial population can comprise ST31, ST71, ST19, and ST66. A bacterial population can comprise ST31, ST71, ST19, and ST116. A bacterial population can comprise ST31, ST71, ST23, and ST81. A bacterial population can comprise ST31, ST71, ST23, and ST119. A bacterial population can comprise ST31, ST71, ST23, and ST37. A bacterial population can comprise ST31, ST71, ST23, and ST66. A bacterial population can comprise ST31, ST71, ST23, and ST116. A bacterial population can comprise ST31, ST71, ST81, and ST119. A bacterial population can comprise ST31, ST71, ST81, and ST37. A bacterial population can comprise ST31, ST71, ST81, and ST66. A bacterial population can comprise ST31, ST71, ST81, and ST116. A bacterial population can comprise ST31, ST71, ST119, and ST37. A bacterial population can comprise ST31, ST71, ST119, and ST66. A bacterial population can comprise ST31, ST71, ST119, and ST116. A bacterial population can comprise ST31, ST71, ST37, and ST66. A bacterial population can comprise ST31, ST71, ST37, and ST116. A bacterial population can comprise ST31, ST71, ST66, and ST116. A bacterial population can comprise ST31, ST19, ST23, and ST81. A bacterial population can comprise ST31, ST19, ST23, and ST119. A bacterial population can comprise ST31, ST19, ST23, and ST37. A bacterial population can comprise ST31, ST19, ST23, and ST66. A bacterial population can comprise ST31, ST19, ST23, and ST116. A bacterial population can comprise ST31, ST19, ST81, and ST119. A bacterial population can comprise ST31, ST19, ST81, and ST37. A bacterial population can comprise ST31, ST19, ST81, and ST66. A bacterial population can comprise ST31, ST19, ST81, and ST116. A bacterial population can comprise ST31, ST19, ST119, and ST37. A bacterial population can comprise ST31, ST19, ST119, and ST66. A bacterial population can comprise ST31, ST19, ST119, and ST116. A bacterial population can comprise ST31, ST19, ST37, and ST66. A bacterial population can comprise ST31, ST19, ST37, and ST116. A bacterial population can comprise ST31, ST19, ST66, and ST116. A bacterial population can comprise ST31, ST23, ST81, and ST119. A bacterial population can comprise ST31, ST23, ST81, and ST37. A bacterial population can comprise ST31, ST23, ST81, and ST66. A bacterial population can comprise ST31, ST23, ST81, and ST116. A bacterial population can comprise ST31, ST23, ST119, and ST37. A bacterial population can comprise ST31, ST23, ST119, and ST66. A bacterial population can comprise ST31, ST23, ST119, and ST116. A bacterial population can comprise ST31, ST23, ST37, and ST66. A bacterial population can comprise ST31, ST23, ST37, and ST116. A bacterial population can comprise ST31, ST23, ST66, and ST116. A bacterial population can comprise ST31, ST81, ST119, and ST37. A bacterial population can comprise ST31, ST81, ST119, and ST66. A bacterial population can comprise ST31, ST81, ST119, and ST116. A bacterial population can comprise ST31, ST81, ST37, and ST66. A bacterial population can comprise ST31, ST81, ST37, and ST116. A bacterial population can comprise ST31, ST81, ST66, and ST116. A bacterial population can comprise ST31, ST119, ST37, and ST66. A bacterial population can comprise ST31, ST119, ST37, and ST116. A bacterial population can comprise ST31, ST119, ST66, and ST116. A bacterial population can comprise ST31, ST37, ST66, and ST116. A bacterial population can comprise ST80, ST65, ST101, and ST56. A bacterial population can comprise ST80, ST65, ST101, and ST71. A bacterial population can comprise ST80, ST65, ST101, and ST19. A bacterial population can comprise ST80, ST65, ST101, and ST23. A bacterial population can comprise ST80, ST65, ST101, and ST81. A bacterial population can comprise ST80, ST65, ST101, and ST119. A bacterial population can comprise ST80, ST65, ST101, and ST37. A bacterial population can comprise ST80, ST65, ST101, and ST66. A bacterial population can comprise ST80, ST65, ST101, and ST116. A bacterial population can comprise ST80, ST65, ST56, and ST71. A bacterial population can comprise ST80, ST65, ST56, and ST19. A bacterial population can comprise ST80, ST65, ST56, and ST23. A bacterial population can comprise ST80, ST65, ST56, and ST81. A bacterial population can comprise ST80, ST65, ST56, and ST119. A bacterial population can comprise ST80, ST65, ST56, and ST37. A bacterial population can comprise ST80, ST65, ST56, and ST66. A bacterial population can comprise ST80, ST65, ST56, and ST116. A bacterial population can comprise ST80, ST65, ST71, and ST19. A bacterial population can comprise ST80, ST65, ST71, and ST23. A bacterial population can comprise ST80, ST65, ST71, and ST81. A bacterial population can comprise ST80, ST65, ST71, and ST119. A bacterial population can comprise ST80, ST65, ST71, and ST37. A bacterial population can comprise ST80, ST65, ST71, and ST66. A bacterial population can comprise ST80, ST65, ST71, and ST116. A bacterial population can comprise ST80, ST65, ST19, and ST23. A bacterial population can comprise ST80, ST65, ST19, and ST81. A bacterial population can comprise ST80, ST65, ST19, and ST119. A bacterial population can comprise ST80, ST65, ST19, and ST37. A bacterial population can comprise ST80, ST65, ST19, and ST66. A bacterial population can comprise ST80, ST65, ST19, and ST116. A bacterial population can comprise ST80, ST65, ST23, and ST81. A bacterial population can comprise ST80, ST65, ST23, and ST119. A bacterial population can comprise ST80, ST65, ST23, and ST37. A bacterial population can comprise ST80, ST65, ST23, and ST66. A bacterial population can comprise ST80, ST65, ST23, and ST116. A bacterial population can comprise ST80, ST65, ST81, and ST119. A bacterial population can comprise ST80, ST65, ST81, and ST37. A bacterial population can comprise ST80, ST65, ST81, and ST66. A bacterial population can comprise ST80, ST65, ST81, and ST116. A bacterial population can comprise ST80, ST65, ST119, and ST37. A bacterial population can comprise ST80, ST65, ST119, and ST66. A bacterial population can comprise ST80, ST65, ST119, and ST116. A bacterial population can comprise ST80, ST65, ST37, and ST66. A bacterial population can comprise ST80, ST65, ST37, and ST116. A bacterial population can comprise ST80, ST65, ST66, and ST116. A bacterial population can comprise ST80, ST101, ST56, and ST71. A bacterial population can comprise ST80, ST101, ST56, and ST19. A bacterial population can comprise ST80, ST101, ST56, and ST23. A bacterial population can comprise ST80, ST101, ST56, and ST81. A bacterial population can comprise ST80, ST101, ST56, and ST119. A bacterial population can comprise ST80, ST101, ST56, and ST37. A bacterial population can comprise ST80, ST101, ST56, and ST66. A bacterial population can comprise ST80, ST101, ST56, and ST116. A bacterial population can comprise ST80, ST101, ST71, and ST19. A bacterial population can comprise ST80, ST101, ST71, and ST23. A bacterial population can comprise ST80, ST101, ST71, and ST81. A bacterial population can comprise ST80, ST101, ST71, and ST119. A bacterial population can comprise ST80, ST101, ST71, and ST37. A bacterial population can comprise ST80, ST101, ST71, and ST66. A bacterial population can comprise ST80, ST101, ST71, and ST116. A bacterial population can comprise ST80, ST101, ST19, and ST23. A bacterial population can comprise ST80, ST101, ST19, and ST81. A bacterial population can comprise ST80, ST101, ST19, and ST119. A bacterial population can comprise ST80, ST101, ST19, and ST37. A bacterial population can comprise ST80, ST101, ST19, and ST66. A bacterial population can comprise ST80, ST101, ST19, and ST116. A bacterial population can comprise ST80, ST101, ST23, and ST81. A bacterial population can comprise ST80, ST101, ST23, and ST119. A bacterial population can comprise ST80, ST101, ST23, and ST37. A bacterial population can comprise ST80, ST101, ST23, and ST66. A bacterial population can comprise ST80, ST101, ST23, and ST116. A bacterial population can comprise ST80, ST101, ST81, and ST119. A bacterial population can comprise ST80, ST101, ST81, and ST37. A bacterial population can comprise ST80, ST101, ST81, and ST66. A bacterial population can comprise ST80, ST101, ST81, and ST116. A bacterial population can comprise ST80, ST101, ST119, and ST37. A bacterial population can comprise ST80, ST101, ST119, and ST66. A bacterial population can comprise ST80, ST101, ST119, and ST116. A bacterial population can comprise ST80, ST101, ST37, and ST66. A bacterial population can comprise ST80, ST101, ST37, and ST116. A bacterial population can comprise ST80, ST101, ST66, and ST116. A bacterial population can comprise ST80, ST56, ST71, and ST19. A bacterial population can comprise ST80, ST56, ST71, and ST23. A bacterial population can comprise ST80, ST56, ST71, and ST81. A bacterial population can comprise ST80, ST56, ST71, and ST119. A bacterial population can comprise ST80, ST56, ST71, and ST37. A bacterial population can comprise ST80, ST56, ST71, and ST66. A bacterial population can comprise ST80, ST56, ST71, and ST116. A bacterial population can comprise ST80, ST56, ST19, and ST23. A bacterial population can comprise ST80, ST56, ST19, and ST81. A bacterial population can comprise ST80, ST56, ST19, and ST119. A bacterial population can comprise ST80, ST56, ST19, and ST37. A bacterial population can comprise ST80, ST56, ST19, and ST66. A bacterial population can comprise ST80, ST56, ST19, and ST116. A bacterial population can comprise ST80, ST56, ST23, and ST81. A bacterial population can comprise ST80, ST56, ST23, and ST119. A bacterial population can comprise ST80, ST56, ST23, and ST37. A bacterial population can comprise ST80, ST56, ST23, and ST66. A bacterial population can comprise ST80, ST56, ST23, and ST116. A bacterial population can comprise ST80, ST56, ST81, and ST119. A bacterial population can comprise ST80, ST56, ST81, and ST37. A bacterial population can comprise ST80, ST56, ST81, and ST66. A bacterial population can comprise ST80, ST56, ST81, and ST116. A bacterial population can comprise ST80, ST56, ST119, and ST37. A bacterial population can comprise ST80, ST56, ST119, and ST66. A bacterial population can comprise ST80, ST56, ST119, and ST116. A bacterial population can comprise ST80, ST56, ST37, and ST66. A bacterial population can comprise ST80, ST56, ST37, and ST116. A bacterial population can comprise ST80, ST56, ST66, and ST116. A bacterial population can comprise ST80, ST71, ST19, and ST23. A bacterial population can comprise ST80, ST71, ST19, and ST81. A bacterial population can comprise ST80, ST71, ST19, and ST119. A bacterial population can comprise ST80, ST71, ST19, and ST37. A bacterial population can comprise ST80, ST71, ST19, and ST66. A bacterial population can comprise ST80, ST71, ST19, and ST116. A bacterial population can comprise ST80, ST71, ST23, and ST81. A bacterial population can comprise ST80, ST71, ST23, and ST119. A bacterial population can comprise ST80, ST71, ST23, and ST37. A bacterial population can comprise ST80, ST71, ST23, and ST66. A bacterial population can comprise ST80, ST71, ST23, and ST116. A bacterial population can comprise ST80, ST71, ST81, and ST119. A bacterial population can comprise ST80, ST71, ST81, and ST37. A bacterial population can comprise ST80, ST71, ST81, and ST66. A bacterial population can comprise ST80, ST71, ST81, and ST116. A bacterial population can comprise ST80, ST71, ST119, and ST37. A bacterial population can comprise ST80, ST71, ST119, and ST66. A bacterial population can comprise ST80, ST71, ST119, and ST116. A bacterial population can comprise ST80, ST71, ST37, and ST66. A bacterial population can comprise ST80, ST71, ST37, and ST116. A bacterial population can comprise ST80, ST71, ST66, and ST116. A bacterial population can comprise ST80, ST19, ST23, and ST81. A bacterial population can comprise ST80, ST19, ST23, and ST119. A bacterial population can comprise ST80, ST19, ST23, and ST37. A bacterial population can comprise ST80, ST19, ST23, and ST66. A bacterial population can comprise ST80, ST19, ST23, and ST116. A bacterial population can comprise ST80, ST19, ST81, and ST119. A bacterial population can comprise ST80, ST19, ST81, and ST37. A bacterial population can comprise ST80, ST19, ST81, and ST66. A bacterial population can comprise ST80, ST19, ST81, and ST116. A bacterial population can comprise ST80, ST19, ST119, and ST37. A bacterial population can comprise ST80, ST19, ST119, and ST66. A bacterial population can comprise ST80, ST19, ST119, and ST116. A bacterial population can comprise ST80, ST19, ST37, and ST66. A bacterial population can comprise ST80, ST19, ST37, and ST116. A bacterial population can comprise ST80, ST19, ST66, and ST116. A bacterial population can comprise ST80, ST23, ST81, and ST119. A bacterial population can comprise ST80, ST23, ST81, and ST37. A bacterial population can comprise ST80, ST23, ST81, and ST66. A bacterial population can comprise ST80, ST23, ST81, and ST116. A bacterial population can comprise ST80, ST23, ST119, and ST37. A bacterial population can comprise ST80, ST23, ST119, and ST66. A bacterial population can comprise ST80, ST23, ST119, and ST116. A bacterial population can comprise ST80, ST23, ST37, and ST66. A bacterial population can comprise ST80, ST23, ST37, and ST116. A bacterial population can comprise ST80, ST23, ST66, and ST116. A bacterial population can comprise ST80, ST81, ST119, and ST37. A bacterial population can comprise ST80, ST81, ST119, and ST66. A bacterial population can comprise ST80, ST81, ST119, and ST116. A bacterial population can comprise ST80, ST81, ST37, and ST66. A bacterial population can comprise ST80, ST81, ST37, and ST116. A bacterial population can comprise ST80, ST81, ST66, and ST116. A bacterial population can comprise ST80, ST119, ST37, and ST66. A bacterial population can comprise ST80, ST119, ST37, and ST116. A bacterial population can comprise ST80, ST119, ST66, and ST116. A bacterial population can comprise ST80, ST37, ST66, and ST116. A bacterial population can comprise ST65, ST101, ST56, and ST71. A bacterial population can comprise ST65, ST101, ST56, and ST19. A bacterial population can comprise ST65, ST101, ST56, and ST23. A bacterial population can comprise ST65, ST101, ST56, and ST81. A bacterial population can comprise ST65, ST101, ST56, and ST119. A bacterial population can comprise ST65, ST101, ST56, and ST37. A bacterial population can comprise ST65, ST101, ST56, and ST66. A bacterial population can comprise ST65, ST101, ST56, and ST116. A bacterial population can comprise ST65, ST101, ST71, and ST19. A bacterial population can comprise ST65, ST101, ST71, and ST23. A bacterial population can comprise ST65, ST101, ST71, and ST81. A bacterial population can comprise ST65, ST101, ST71, and ST119. A bacterial population can comprise ST65, ST101, ST71, and ST37. A bacterial population can comprise ST65, ST101, ST71, and ST66. A bacterial population can comprise ST65, ST101, ST71, and ST116. A bacterial population can comprise ST65, ST101, ST19, and ST23. A bacterial population can comprise ST65, ST101, ST19, and ST81. A bacterial population can comprise ST65, ST101, ST19, and ST119. A bacterial population can comprise ST65, ST101, ST19, and ST37. A bacterial population can comprise ST65, ST101, ST19, and ST66. A bacterial population can comprise ST65, ST101, ST19, and ST116. A bacterial population can comprise ST65, ST101, ST23, and ST81. A bacterial population can comprise ST65, ST101, ST23, and ST119. A bacterial population can comprise ST65, ST101, ST23, and ST37. A bacterial population can comprise ST65, ST101, ST23, and ST66. A bacterial population can comprise ST65, ST101, ST23, and ST116. A bacterial population can comprise ST65, ST101, ST81, and ST119. A bacterial population can comprise ST65, ST101, ST81, and ST37. A bacterial population can comprise ST65, ST101, ST81, and ST66. A bacterial population can comprise ST65, ST101, ST81, and ST116. A bacterial population can comprise ST65, ST101, ST119, and ST37. A bacterial population can comprise ST65, ST101, ST119, and ST66. A bacterial population can comprise ST65, ST101, ST119, and ST116. A bacterial population can comprise ST65, ST101, ST37, and ST66. A bacterial population can comprise ST65, ST101, ST37, and ST116. A bacterial population can comprise ST65, ST101, ST66, and ST116. A bacterial population can comprise ST65, ST56, ST71, and ST19. A bacterial population can comprise ST65, ST56, ST71, and ST23. A bacterial population can comprise ST65, ST56, ST71, and ST81. A bacterial population can comprise ST65, ST56, ST71, and ST119. A bacterial population can comprise ST65, ST56, ST71, and ST37. A bacterial population can comprise ST65, ST56, ST71, and ST66. A bacterial population can comprise ST65, ST56, ST71, and ST116. A bacterial population can comprise ST65, ST56, ST19, and ST23. A bacterial population can comprise ST65, ST56, ST19, and ST81. A bacterial population can comprise ST65, ST56, ST19, and ST119. A bacterial population can comprise ST65, ST56, ST19, and ST37. A bacterial population can comprise ST65, ST56, ST19, and ST66. A bacterial population can comprise ST65, ST56, ST19, and ST116. A bacterial population can comprise ST65, ST56, ST23, and ST81. A bacterial population can comprise ST65, ST56, ST23, and ST119. A bacterial population can comprise ST65, ST56, ST23, and ST37. A bacterial population can comprise ST65, ST56, ST23, and ST66. A bacterial population can comprise ST65, ST56, ST23, and ST116. A bacterial population can comprise ST65, ST56, ST81, and ST119. A bacterial population can comprise ST65, ST56, ST81, and ST37. A bacterial population can comprise ST65, ST56, ST81, and ST66. A bacterial population can comprise ST65, ST56, ST81, and ST116. A bacterial population can comprise ST65, ST56, ST119, and ST37. A bacterial population can comprise ST65, ST56, ST119, and ST66. A bacterial population can comprise ST65, ST56, ST119, and ST116. A bacterial population can comprise ST65, ST56, ST37, and ST66. A bacterial population can comprise ST65, ST56, ST37, and ST116. A bacterial population can comprise ST65, ST56, ST66, and ST116. A bacterial population can comprise ST65, ST71, ST19, and ST23. A bacterial population can comprise ST65, ST71, ST19, and ST81. A bacterial population can comprise ST65, ST71, ST19, and ST119. A bacterial population can comprise ST65, ST71, ST19, and ST37. A bacterial population can comprise ST65, ST71, ST19, and ST66. A bacterial population can comprise ST65, ST71, ST19, and ST116. A bacterial population can comprise ST65, ST71, ST23, and ST81. A bacterial population can comprise ST65, ST71, ST23, and ST119. A bacterial population can comprise ST65, ST71, ST23, and ST37. A bacterial population can comprise ST65, ST71, ST23, and ST66. A bacterial population can comprise ST65, ST71, ST23, and ST116. A bacterial population can comprise ST65, ST71, ST81, and ST119. A bacterial population can comprise ST65, ST71, ST81, and ST37. A bacterial population can comprise ST65, ST71, ST81, and ST66. A bacterial population can comprise ST65, ST71, ST81, and ST116. A bacterial population can comprise ST65, ST71, ST119, and ST37. A bacterial population can comprise ST65, ST71, ST119, and ST66. A bacterial population can comprise ST65, ST71, ST119, and ST116. A bacterial population can comprise ST65, ST71, ST37, and ST66. A bacterial population can comprise ST65, ST71, ST37, and ST116. A bacterial population can comprise ST65, ST71, ST66, and ST116. A bacterial population can comprise ST65, ST19, ST23, and ST81. A bacterial population can comprise ST65, ST19, ST23, and ST119. A bacterial population can comprise ST65, ST19, ST23, and ST37. A bacterial population can comprise ST65, ST19, ST23, and ST66. A bacterial population can comprise ST65, ST19, ST23, and ST116. A bacterial population can comprise ST65, ST19, ST81, and ST119. A bacterial population can comprise ST65, ST19, ST81, and ST37. A bacterial population can comprise ST65, ST19, ST81, and ST66. A bacterial population can comprise ST65, ST19, ST81, and ST116. A bacterial population can comprise ST65, ST19, ST119, and ST37. A bacterial population can comprise ST65, ST19, ST119, and ST66. A bacterial population can comprise ST65, ST19, ST119, and ST116. A bacterial population can comprise ST65, ST19, ST37, and ST66. A bacterial population can comprise ST65, ST19, ST37, and ST116. A bacterial population can comprise ST65, ST19, ST66, and ST116. A bacterial population can comprise ST65, ST23, ST81, and ST119. A bacterial population can comprise ST65, ST23, ST81, and ST37. A bacterial population can comprise ST65, ST23, ST81, and ST66. A bacterial population can comprise ST65, ST23, ST81, and ST116. A bacterial population can comprise ST65, ST23, ST119, and ST37. A bacterial population can comprise ST65, ST23, ST119, and ST66. A bacterial population can comprise ST65, ST23, ST119, and ST116. A bacterial population can comprise ST65, ST23, ST37, and ST66. A bacterial population can comprise ST65, ST23, ST37, and ST116. A bacterial population can comprise ST65, ST23, ST66, and ST116. A bacterial population can comprise ST65, ST81, ST119, and ST37. A bacterial population can comprise ST65, ST81, ST119, and ST66. A bacterial population can comprise ST65, ST81, ST119, and ST116. A bacterial population can comprise ST65, ST81, ST37, and ST66. A bacterial population can comprise ST65, ST81, ST37, and ST116. A bacterial population can comprise ST65, ST81, ST66, and ST116. A bacterial population can comprise ST65, ST119, ST37, and ST66. A bacterial population can comprise ST65, ST119, ST37, and ST116. A bacterial population can comprise ST65, ST119, ST66, and ST116. A bacterial population can comprise ST65, ST37, ST66, and ST116. A bacterial population can comprise ST101, ST56, ST71, and ST19. A bacterial population can comprise ST101, ST56, ST71, and ST23. A bacterial population can comprise ST101, ST56, ST71, and ST81. A bacterial population can comprise ST101, ST56, ST71, and ST119. A bacterial population can comprise ST101, ST56, ST71, and ST37. A bacterial population can comprise ST101, ST56, ST71, and ST66. A bacterial population can comprise ST101, ST56, ST71, and ST116. A bacterial population can comprise ST101, ST56, ST19, and ST23. A bacterial population can comprise ST101, ST56, ST19, and ST81. A bacterial population can comprise ST101, ST56, ST19, and ST119. A bacterial population can comprise ST101, ST56, ST19, and ST37. A bacterial population can comprise ST101, ST56, ST19, and ST66. A bacterial population can comprise ST101, ST56, ST19, and ST116. A bacterial population can comprise ST101, ST56, ST23, and ST81. A bacterial population can comprise ST101, ST56, ST23, and ST119. A bacterial population can comprise ST101, ST56, ST23, and ST37. A bacterial population can comprise ST101, ST56, ST23, and ST66. A bacterial population can comprise ST101, ST56, ST23, and ST116. A bacterial population can comprise ST101, ST56, ST81, and ST119. A bacterial population can comprise ST101, ST56, ST81, and ST37. A bacterial population can comprise ST101, ST56, ST81, and ST66. A bacterial population can comprise ST101, ST56, ST81, and ST116. A bacterial population can comprise ST101, ST56, ST119, and ST37. A bacterial population can comprise ST101, ST56, ST119, and ST66. A bacterial population can comprise ST101, ST56, ST119, and ST116. A bacterial population can comprise ST101, ST56, ST37, and ST66. A bacterial population can comprise ST101, ST56, ST37, and ST116. A bacterial population can comprise ST101, ST56, ST66, and ST116. A bacterial population can comprise ST101, ST71, ST19, and ST23. A bacterial population can comprise ST101, ST71, ST19, and ST81. A bacterial population can comprise ST101, ST71, ST19, and ST119. A bacterial population can comprise ST101, ST71, ST19, and ST37. A bacterial population can comprise ST101, ST71, ST19, and ST66. A bacterial population can comprise ST101, ST71, ST19, and ST116. A bacterial population can comprise ST101, ST71, ST23, and ST81. A bacterial population can comprise ST101, ST71, ST23, and ST119. A bacterial population can comprise ST101, ST71, ST23, and ST37. A bacterial population can comprise ST101, ST71, ST23, and ST66. A bacterial population can comprise ST101, ST71, ST23, and ST116. A bacterial population can comprise ST101, ST71, ST81, and ST119. A bacterial population can comprise ST101, ST71, ST81, and ST37. A bacterial population can comprise ST101, ST71, ST81, and ST66. A bacterial population can comprise ST101, ST71, ST81, and ST116. A bacterial population can comprise ST101, ST71, ST119, and ST37. A bacterial population can comprise ST101, ST71, ST119, and ST66. A bacterial population can comprise ST101, ST71, ST119, and ST116. A bacterial population can comprise ST101, ST71, ST37, and ST66. A bacterial population can comprise ST101, ST71, ST37, and ST116. A bacterial population can comprise ST101, ST71, ST66, and ST116. A bacterial population can comprise ST101, ST19, ST23, and ST81. A bacterial population can comprise ST101, ST19, ST23, and ST119. A bacterial population can comprise ST101, ST19, ST23, and ST37. A bacterial population can comprise ST101, ST19, ST23, and ST66. A bacterial population can comprise ST101, ST19, ST23, and ST116. A bacterial population can comprise ST101, ST19, ST81, and ST119. A bacterial population can comprise ST101, ST19, ST81, and ST37. A bacterial population can comprise ST101, ST19, ST81, and ST66. A bacterial population can comprise ST101, ST19, ST81, and ST116. A bacterial population can comprise ST101, ST19, ST119, and ST37. A bacterial population can comprise ST101, ST19, ST119, and ST66. A bacterial population can comprise ST101, ST19, ST119, and ST116. A bacterial population can comprise ST101, ST19, ST37, and ST66. A bacterial population can comprise ST101, ST19, ST37, and ST116. A bacterial population can comprise ST101, ST19, ST66, and ST116. A bacterial population can comprise ST101, ST23, ST81, and ST119. A bacterial population can comprise ST101, ST23, ST81, and ST37. A bacterial population can comprise ST101, ST23, ST81, and ST66. A bacterial population can comprise ST101, ST23, ST81, and ST116. A bacterial population can comprise ST101, ST23, ST119, and ST37. A bacterial population can comprise ST101, ST23, ST119, and ST66. A bacterial population can comprise ST101, ST23, ST119, and ST116. A bacterial population can comprise ST101, ST23, ST37, and ST66. A bacterial population can comprise ST101, ST23, ST37, and ST116. A bacterial population can comprise ST101, ST23, ST66, and ST116. A bacterial population can comprise ST101, ST81, ST119, and ST37. A bacterial population can comprise ST101, ST81, ST119, and ST66. A bacterial population can comprise ST101, ST81, ST119, and ST116. A bacterial population can comprise ST101, ST81, ST37, and ST66. A bacterial population can comprise ST101, ST81, ST37, and ST116. A bacterial population can comprise ST101, ST81, ST66, and ST116. A bacterial population can comprise ST101, ST119, ST37, and ST66. A bacterial population can comprise ST101, ST119, ST37, and ST116. A bacterial population can comprise ST101, ST119, ST66, and ST116. A bacterial population can comprise ST101, ST37, ST66, and ST116. A bacterial population can comprise ST56, ST71, ST19, and ST23. A bacterial population can comprise ST56, ST71, ST19, and ST81. A bacterial population can comprise ST56, ST71, ST19, and ST119. A bacterial population can comprise ST56, ST71, ST19, and ST37. A bacterial population can comprise ST56, ST71, ST19, and ST66. A bacterial population can comprise ST56, ST71, ST19, and ST116. A bacterial population can comprise ST56, ST71, ST23, and ST81. A bacterial population can comprise ST56, ST71, ST23, and ST119. A bacterial population can comprise ST56, ST71, ST23, and ST37. A bacterial population can comprise ST56, ST71, ST23, and ST66. A bacterial population can comprise ST56, ST71, ST23, and ST116. A bacterial population can comprise ST56, ST71, ST81, and ST119. A bacterial population can comprise ST56, ST71, ST81, and ST37. A bacterial population can comprise ST56, ST71, ST81, and ST66. A bacterial population can comprise ST56, ST71, ST81, and ST116. A bacterial population can comprise ST56, ST71, ST119, and ST37. A bacterial population can comprise ST56, ST71, ST119, and ST66. A bacterial population can comprise ST56, ST71, ST119, and ST116. A bacterial population can comprise ST56, ST71, ST37, and ST66. A bacterial population can comprise ST56, ST71, ST37, and ST116. A bacterial population can comprise ST56, ST71, ST66, and ST116. A bacterial population can comprise ST56, ST19, ST23, and ST81. A bacterial population can comprise ST56, ST19, ST23, and ST119. A bacterial population can comprise ST56, ST19, ST23, and ST37. A bacterial population can comprise ST56, ST19, ST23, and ST66. A bacterial population can comprise ST56, ST19, ST23, and ST116. A bacterial population can comprise ST56, ST19, ST81, and ST119. A bacterial population can comprise ST56, ST19, ST81, and ST37. A bacterial population can comprise ST56, ST19, ST81, and ST66. A bacterial population can comprise ST56, ST19, ST81, and ST116. A bacterial population can comprise ST56, ST19, ST119, and ST37. A bacterial population can comprise ST56, ST19, ST119, and ST66. A bacterial population can comprise ST56, ST19, ST119, and ST116. A bacterial population can comprise ST56, ST19, ST37, and ST66. A bacterial population can comprise ST56, ST19, ST37, and ST116. A bacterial population can comprise ST56, ST19, ST66, and ST116. A bacterial population can comprise ST56, ST23, ST81, and ST119. A bacterial population can comprise ST56, ST23, ST81, and ST37. A bacterial population can comprise ST56, ST23, ST81, and ST66. A bacterial population can comprise ST56, ST23, ST81, and ST116. A bacterial population can comprise ST56, ST23, ST119, and ST37. A bacterial population can comprise ST56, ST23, ST119, and ST66. A bacterial population can comprise ST56, ST23, ST119, and ST116. A bacterial population can comprise ST56, ST23, ST37, and ST66. A bacterial population can comprise ST56, ST23, ST37, and ST116. A bacterial population can comprise ST56, ST23, ST66, and ST116. A bacterial population can comprise ST56, ST81, ST119, and ST37. A bacterial population can comprise ST56, ST81, ST119, and ST66. A bacterial population can comprise ST56, ST81, ST119, and ST116. A bacterial population can comprise ST56, ST81, ST37, and ST66. A bacterial population can comprise ST56, ST81, ST37, and ST116. A bacterial population can comprise ST56, ST81, ST66, and ST116. A bacterial population can comprise ST56, ST119, ST37, and ST66. A bacterial population can comprise ST56, ST119, ST37, and ST116. A bacterial population can comprise ST56, ST119, ST66, and ST116. A bacterial population can comprise ST56, ST37, ST66, and ST116. A bacterial population can comprise ST71, ST19, ST23, and ST81. A bacterial population can comprise ST71, ST19, ST23, and ST119. A bacterial population can comprise ST71, ST19, ST23, and ST37. A bacterial population can comprise ST71, ST19, ST23, and ST66. A bacterial population can comprise ST71, ST19, ST23, and ST116. A bacterial population can comprise ST71, ST19, ST81, and ST119. A bacterial population can comprise ST71, ST19, ST81, and ST37. A bacterial population can comprise ST71, ST19, ST81, and ST66. A bacterial population can comprise ST71, ST19, ST81, and ST116. A bacterial population can comprise ST71, ST19, ST119, and ST37. A bacterial population can comprise ST71, ST19, ST119, and ST66. A bacterial population can comprise ST71, ST19, ST119, and ST116. A bacterial population can comprise ST71, ST19, ST37, and ST66. A bacterial population can comprise ST71, ST19, ST37, and ST116. A bacterial population can comprise ST71, ST19, ST66, and ST116. A bacterial population can comprise ST71, ST23, ST81, and ST119. A bacterial population can comprise ST71, ST23, ST81, and ST37. A bacterial population can comprise ST71, ST23, ST81, and ST66. A bacterial population can comprise ST71, ST23, ST81, and ST116. A bacterial population can comprise ST71, ST23, ST119, and ST37. A bacterial population can comprise ST71, ST23, ST119, and ST66. A bacterial population can comprise ST71, ST23, ST119, and ST116. A bacterial population can comprise ST71, ST23, ST37, and ST66. A bacterial population can comprise ST71, ST23, ST37, and ST116. A bacterial population can comprise ST71, ST23, ST66, and ST116. A bacterial population can comprise ST71, ST81, ST119, and ST37. A bacterial population can comprise ST71, ST81, ST119, and ST66. A bacterial population can comprise ST71, ST81, ST119, and ST116. A bacterial population can comprise ST71, ST81, ST37, and ST66. A bacterial population can comprise ST71, ST81, ST37, and ST116. A bacterial population can comprise ST71, ST81, ST66, and ST116. A bacterial population can comprise ST71, ST119, ST37, and ST66. A bacterial population can comprise ST71, ST119, ST37, and ST116. A bacterial population can comprise ST71, ST119, ST66, and ST116. A bacterial population can comprise ST71, ST37, ST66, and ST116. A bacterial population can comprise ST19, ST23, ST81, and ST119. A bacterial population can comprise ST19, ST23, ST81, and ST37. A bacterial population can comprise ST19, ST23, ST81, and ST66. A bacterial population can comprise ST19, ST23, ST81, and ST116. A bacterial population can comprise ST19, ST23, ST119, and ST37. A bacterial population can comprise ST19, ST23, ST119, and ST66. A bacterial population can comprise ST19, ST23, ST119, and ST116. A bacterial population can comprise ST19, ST23, ST37, and ST66. A bacterial population can comprise ST19, ST23, ST37, and ST116. A bacterial population can comprise ST19, ST23, ST66, and ST116. A bacterial population can comprise ST19, ST81, ST119, and ST37. A bacterial population can comprise ST19, ST81, ST119, and ST66. A bacterial population can comprise ST19, ST81, ST119, and ST116. A bacterial population can comprise ST19, ST81, ST37, and ST66. A bacterial population can comprise ST19, ST81, ST37, and ST116. A bacterial population can comprise ST19, ST81, ST66, and ST116. A bacterial population can comprise ST19, ST119, ST37, and ST66. A bacterial population can comprise ST19, ST119, ST37, and ST116. A bacterial population can comprise ST19, ST119, ST66, and ST116. A bacterial population can comprise ST19, ST37, ST66, and ST116. A bacterial population can comprise ST23, ST81, ST119, and ST37. A bacterial population can comprise ST23, ST81, ST119, and ST66. A bacterial population can comprise ST23, ST81, ST119, and ST116. A bacterial population can comprise ST23, ST81, ST37, and ST66. A bacterial population can comprise ST23, ST81, ST37, and ST116. A bacterial population can comprise ST23, ST81, ST66, and ST116. A bacterial population can comprise ST23, ST119, ST37, and ST66. A bacterial population can comprise ST23, ST119, ST37, and ST116. A bacterial population can comprise ST23, ST119, ST66, and ST116. A bacterial population can comprise ST23, ST37, ST66, and ST116. A bacterial population can comprise ST81, ST119, ST37, and ST66. A bacterial population can comprise ST81, ST119, ST37, and ST116. A bacterial population can comprise ST81, ST119, ST66, and ST116. A bacterial population can comprise ST81, ST37, ST66, and ST116. A bacterial population can comprise ST119, ST37, ST66, and ST116.

[0247] A bacterial population can comprise a bacterial strain of each of the following: Bifidobacterium adolescentis, Lactobacillus rhamnosus, Bifidobacterium longum, Bifidobacterium bifidum, and Bifidobacterium pseudocatenulatum. A bacterial population can comprise a bacterial strain of each of the following: Bifidobacterium adolescentis, Lactobacillus rhamnosus, Bifidobacterium longum, Bifidobacterium bifidum, and Bifidobacterium breve. A bacterial population can comprise a bacterial strain of each of the following: Bifidobacterium adolescentis, Lactobacillus rhamnosus, Bifidobacterium longum, Bifidobacterium bifidum, and Lactobacillus plantarum. A bacterial population can comprise a bacterial strain of each of the following: Bifidobacterium adolescentis, Lactobacillus rhamnosus, Bifidobacterium longum, Bifidobacterium pseudocatenulatum, and Bifidobacterium breve. A bacterial population can comprise a bacterial strain of each of the following: Bifidobacterium adolescentis, Lactobacillus rhamnosus, Bifidobacterium longum, Bifidobacterium pseudocatenulatum, and Lactobacillus plantarum. A bacterial population can comprise a bacterial strain of each of the following: Bifidobacterium adolescentis, Lactobacillus rhamnosus, Bifidobacterium longum, Bifidobacterium breve, and Lactobacillus plantarum. A bacterial population can comprise a bacterial strain of each of the following: Bifidobacterium adolescentis, Lactobacillus rhamnosus, Bifidobacterium bifidum, Bifidobacterium pseudocatenulatum, and Bifidobacterium breve. A bacterial population can comprise a bacterial strain of each of the following: Bifidobacterium adolescentis, Lactobacillus rhamnosus, Bifidobacterium bifidum, Bifidobacterium pseudocatenulatum, and Lactobacillus plantarum. A bacterial population can comprise a bacterial strain of each of the following: Bifidobacterium adolescentis, Lactobacillus rhamnosus, Bifidobacterium bifidum, Bifidobacterium breve, and Lactobacillus plantarum. A bacterial population can comprise a bacterial strain of each of the following: Bifidobacterium adolescentis, Lactobacillus rhamnosus, Bifidobacterium pseudocatenulatum, Bifidobacterium breve, and Lactobacillus plantarum. A bacterial population can comprise a bacterial strain of each of the following: Bifidobacterium adolescentis, Bifidobacterium longum, Bifidobacterium bifidum, Bifidobacterium pseudocatenulatum, and Bifidobacterium breve. A bacterial population can comprise a bacterial strain of each of the following: Bifidobacterium adolescentis, Bifidobacterium longum, Bifidobacterium bifidum, Bifidobacterium pseudocatenulatum, and Lactobacillus plantarum. A bacterial population can comprise a bacterial strain of each of the following: Bifidobacterium adolescentis, Bifidobacterium longum, Bifidobacterium bifidum, Bifidobacterium breve, and Lactobacillus plantarum. A bacterial population can comprise a bacterial strain of each of the following: Bifidobacterium adolescentis, Bifidobacterium longum, Bifidobacterium pseudocatenulatum, Bifidobacterium breve, and Lactobacillus plantarum. A bacterial population can comprise a bacterial strain of each of the following: Bifidobacterium adolescentis, Bifidobacterium bifidum, Bifidobacterium pseudocatenulatum, Bifidobacterium breve, and Lactobacillus plantarum. A bacterial population can comprise a bacterial strain of each of the following: Lactobacillus rhamnosus, Bifidobacterium longum, Bifidobacterium bifidum, Bifidobacterium pseudocatenulatum, and Bifidobacterium breve. A bacterial population can comprise a bacterial strain of each of the following: Lactobacillus rhamnosus, Bifidobacterium longum, Bifidobacterium bifidum, Bifidobacterium pseudocatenulatum, and Lactobacillus plantarum. A bacterial population can comprise a bacterial strain of each of the following: Lactobacillus rhamnosus, Bifidobacterium longum, Bifidobacterium bifidum, Bifidobacterium breve, and Lactobacillus plantarum. A bacterial population can comprise a bacterial strain of each of the following: Lactobacillus rhamnosus, Bifidobacterium longum, Bifidobacterium pseudocatenulatum, Bifidobacterium breve, and Lactobacillus plantarum. A bacterial population can comprise a bacterial strain of each of the following: Lactobacillus rhamnosus, Bifidobacterium bifidum, Bifidobacterium pseudocatenulatum, Bifidobacterium breve, and Lactobacillus plantarum. A bacterial population can comprise a bacterial strain of each of the following: Bifidobacterium longum, Bifidobacterium bifidum, Bifidobacterium pseudocatenulatum, Bifidobacterium breve, and Lactobacillus plantarum. For the bacterial composition comprising any 5 of Bifidobacterium adolescentis, Lactobacillus rhamnosus, Bifidobacterium longum, Bifidobacterium bifidum, Bifidobacterium pseudocatenulatum, Bifidobacterium breve, and Lactobacillus plantarum, Bifidobacterium adolescentis can comprise ST101; Lactobacillus rhamnosus can comprise ST116; Bifidobacterium longum can comprise ST119, ST19, ST81, or ST23; Bifidobacterium bifidum can comprise ST31 or ST80; Bifidobacterium breve can comprise ST56 or ST71; Bifidobacterium pseudocatenulatum can comprise ST37 or ST66; and Lactobacillus plantarum can comprise ST65.

[0248] A bacterial population can comprise a bacterial strain of each of the following: Bifidobacterium bifidum, Lactobacillus plantarum, Bifidobacterium longum, Bifidobacterium adolescentis, and Bifidobacterium breve. A bacterial population can comprise a bacterial strain of each of the following: Bifidobacterium bifidum, Lactobacillus plantarum, Bifidobacterium longum, Bifidobacterium adolescentis, and Bifidobacterium pseudocatenulatum. A bacterial population can comprise a bacterial strain of each of the following: Bifidobacterium bifidum, Lactobacillus plantarum, Bifidobacterium longum, Bifidobacterium adolescentis, and Lactobacillus rhamnosus. A bacterial population can comprise a bacterial strain of each of the following: Bifidobacterium bifidum, Lactobacillus plantarum, Bifidobacterium longum, Bifidobacterium breve, and Bifidobacterium pseudocatenulatum. A bacterial population can comprise a bacterial strain of each of the following: Bifidobacterium bifidum, Lactobacillus plantarum, Bifidobacterium longum, Bifidobacterium breve, and Lactobacillus rhamnosus. A bacterial population can comprise a bacterial strain of each of the following: Bifidobacterium bifidum, Lactobacillus plantarum, Bifidobacterium longum, Bifidobacterium pseudocatenulatum, and Lactobacillus rhamnosus. A bacterial population can comprise ST31, ST65, ST119, ST101, and ST56. A bacterial population can comprise ST31, ST65, ST119, ST101, and ST71. A bacterial population can comprise ST31, ST65, ST119, ST101, and ST37. A bacterial population can comprise ST31, ST65, ST119, ST101, and ST66. A bacterial population can comprise ST31, ST65, ST119, ST101, and ST116. A bacterial population can comprise ST31, ST65, ST119, ST56, and ST71. A bacterial population can comprise ST31, ST65, ST119, ST56, and ST37. A bacterial population can comprise ST31, ST65, ST119, ST56, and ST66. A bacterial population can comprise ST31, ST65, ST119, ST56, and ST116. A bacterial population can comprise ST31, ST65, ST119, ST71, and ST37. A bacterial population can comprise ST31, ST65, ST119, ST71, and ST66. A bacterial population can comprise ST31, ST65, ST119, ST71, and ST116. A bacterial population can comprise ST31, ST65, ST119, ST37, and ST66. A bacterial population can comprise ST31, ST65, ST119, ST37, and ST116. A bacterial population can comprise ST31, ST65, ST119, ST66, and ST116. In some cases, the bacterial population can comprise any of the aforementioned bacterial strains in addition to one or more additional bacterial strains from Bifidobacterium sp. or Lactobacillus sp. (or Vertebrate-Associated Lactobacillaceae).

### Collective Interactions

[0249] The bacterial population described herein can comprise a plurality of bacterial strains. In some cases, a first bacterial strain and a second bacterial strain different from the first bacterial strains of the plurality of bacterial strains can form a “collective interaction” or have a “collective effect”.

[0250] As used herein, a collective effect is an effect of a group of entities that, when present simultaneously, is greater than any individual effect of any individual entity of the group when present alone, individually, or not simultaneously. An interaction of the entities that facilitate the generation of the collective effect is referred to as the “collective interaction.” In some cases, a collective effect can comprise a synergistic effect. As used herein, a synergistic effect is an effect of a group of entities that, when present simultaneously, is greater than the sum of the effect of any individual entities when present alone, individually, or not simultaneously. An interaction of the entities that facilitate the generation of the synergistic effect is referred to as the “synergistic interaction.”

[0251] When referring to a plurality of bacterial strains of a bacterial population, a collective effect is an effect resulting from the interaction of at least two bacterial strains of the bacterial population that is greater than either or both effect of two control different bacterial populations each comprising only one of the two bacterial strains, wherein each of the two control bacterial populations has not been cultured or in contact with: (1) a cultured medium or supernatant of the other bacteria strain and/or (2) a bacterial product generated by the other bacteria strain. The interaction between the two bacterial strains that facilitates the collective effect is referred herein as the “collective interaction.” The collective effect can also comprise an effect resulting from the interaction of at least a first bacterial strain and: (1) a cultured medium of a second bacterial strain (different from the first bacterial strain) or a supernatant thereof; or (2) a bacterial product generated by the second bacterial strain that is greater than either or both effect of two control different bacterial populations each comprising only one of the two bacterial strains, wherein each of the two control bacterial populations has not been cultured or in contact with: (1) a cultured medium or supernatant of the other bacteria strain and/or (2) a bacterial product generated by the other bacteria strain. As used herein, when referring to multiple entities, the use of ordinal numbering is used to distinguish various distinguishable entities and should not be interpreted to limited to any one particular entity. A control composition or control formulation may comprise any control or control bacterial populations as described herein.

[0252] In some case, the collective interaction between two bacterial strains can encompass various mechanisms. For example, the collective interaction between two bacterial strains can comprise cross-feeding or syntrophy, as described here. Bacterial syntrophy occurs when one bacterial strains/species feeds off the bacterial product(s) (such as a metabolite) of another different bacterial strains/species. For example, during syntrophy, a first bacterial strain may use a second bacterial product (generated by a second bacterial strain different from the first bacterial strain) to generate a first bacterial product different from the second bacterial product. The first bacterial strain may use the second bacterial product as a carbon source. The first bacterial strain may use the second bacterial product as an energy source. As used herein, an energy source is a purified substance that acts as a source for energy production of a microbial organism added into the culture medium for culturing the microbial organism.

[0253] In some cases, the collective interaction between two bacterial strains can comprise modification(s) of at least one of the two bacterial strains. For example, a first bacterial strain may be modified (genetically, epigenetically, or metabolically) by a second bacterial product (generated by a second bacterial strain different from the first bacterial strain). Such modification may facilitate the modified first bacterial strain to exhibit an ability different from the unmodified bacteria, e.g., a collective effect in any one of the disease associated functions as described herein.

[0254] Two bacterial strains can exhibit a collective interaction when directly cultured together. Two bacterial strains can exhibit a collective interaction when directly cultured individually. When two collective bacterial stains cultured individually, the collective interaction can be mediated via a “conditioned medium” or “cultured medium.” As used herein, a cultured or conditioned medium comprises a culture medium that has been used to culture a bacterial strain. For example, in some case, the cultured medium may comprise a second bacterial product generated by the second bacterial strain. When used to culture a first bacterial strain different from the second bacterial strain, the first bacterial strain may feed off the second bacterial product or is modified by the second bacterial product. Bacterial syntrophy may occur via a medium comprising a carbon source or an energy source, for example a carbohydrate media or complete media, and a second bacterial strain or supernatant thereof.

[0255] In some cases, the bacterial population comprising at least two bacterial strains that exhibit a collective interaction can comprise any of the bacterial population as described herein. In some cases, the bacterial population comprising at least two bacterial strains that exhibit a collective interaction can also be extended to a composition comprising (1) any one of the bacterial strain and (2) the conditioned medium of the other bacterial strain or a supernatant thereof, and/or a bacterial product produced by the other bacterial strain. For example, a collective bacterial population comprising bacterial strain A and bacterial strain B can comprise: (1) A and (2) B, the conditioned medium of B or a supernatant thereof, and/or the bacterial product produced by B. In some cases, composition can also comprise: (1) the conditioned medium of A (or a supernatant thereof) or bacterial product produced by A and (2) the conditioned medium of B (or a supernatant thereof) or bacterial product produced by B. Thus, the disclosure of the bacterial population can be extended to the conditioned medium (or a supernatant thereof) by the bacterial strain and the bacterial product generated by the bacterial strain, as described in the bacterial population disclosed herein.

[0256] In some cases, for two bacterial strains exhibiting a collective interaction as described herein, a first bacterial strain of the two bacterial strains may be a donor bacterial strain and a second bacterial strain of the two bacterial strains different from the first bacterial strain may be a recipient strain, or vice versa. A “donor bacterial strain” or “donor strain,” as used herein, refers to a first bacterial strain that is capable of generating a bacterial product that can facilitate a collective interaction with a second bacterial strain. A “recipient bacterial strain” or “recipient strain,” as used herein, refers to a second bacterial strain that is capable of utilizing a bacterial product generated by a first bacterial strain to form the collective interaction as described herein. The methods to identify a donor or recipient strains are described herein, for example, in EXAMPLEs 4 and 7-8. Wherein when describing a cross-feeing of two bacterial strains that exhibit a collective interaction, the donor bacterial strain can cross-feed the recipient bacterial strain (i.e., the recipient bacterial strain is cross-fed). In some cases, as described herein, the cross-feeding can comprise inoculating/culturing the two bacterial strains together. In other cases, the cross-feeding can comprise inoculating the donor bacterial strain, generating a conditioned medium of the donor bacterial strain (or a supernatant thereof or a bacterial product generated by the donor bacterial strain), and inoculating/culturing the recipient strain with the conditioned medium of the donor bacterial strain (or a supernatant thereof or a bacterial product generated by the donor bacterial strain). In cross-feeding, the conditioned medium can be supplemented with a carbon source, as described herein.

[0257] In some cases, a first bacterial strain (such as any bacterial strain described herein) may have a sufficient ability in a first disease-associated function but does not have a sufficient ability in a second disease-associated function; a second bacterial strain different from the first bacterial strain (such as any bacterial strain described herein) may have a sufficient ability in a first disease-associated function but does not have a sufficient ability in the first disease-associated function. By generating a bacterial population comprising the first and second bacterial strains, the bacterial population can thus exhibit a collective effect or synergistic effect in the first and/or second disease-associated functions. In an illustrative example, a collective bacterial population may comprise at least one donor and one recipient bacterial strains. A donor strain may be capable of utilizing a vaginally (or infant gastrointestinally) relevant carbohydrate and convert the carbohydrate into a different bacterial product (such as a metabolite) but is incapable (or sufficiently capable) of inhibiting a growth of a vaginal (or infant gastrointestinal) pathogen. A recipient may be incapable of (or sufficiently capable) utilizing a vaginally (or infant gastrointestinally) relevant carbohydrate but is capable of utilizing the different bacterial product (such as a metabolite) and inhibiting a growth of a vaginal (or infant gastrointestinal) pathogen. Thus, while the bacterial populations comprising the individual donor or recipient bacterial strains may not be sufficient to inhibiting a growth of the vaginal (or infant gastrointestinal) pathogen within an environment comprising only the vaginally (or infant gastrointestinally) relevant carbohydrate as the nutrient source (since they cannot both proliferate and inhibit the growth of the pathogen within that environment), the bacterial population comprising both of the donor and recipient strains is capable of proliferating and inhibiting the growth of the pathogen within that environment. In another illustrative example, a bacterial population comprising the recipient bacterial strain and a cultured medium (of supernatant thereof) of the donor bacterial strain is also capable of proliferating and inhibiting the growth of the pathogen within that environment, since the cultured medium of the donor bacterial strain can contain the different bacterial product (such as a metabolite) generated by the donor bacterial strain such that the recipient bacterial strain can utilize and proliferate.

### Collective Effects

[0258] In some cases, a bacterial strain may exhibit sufficient abilities in the disease associated function as described herein using at least in part of the bacterial product. For example, a bacterial product may directly or indirectly inhibit the growth/biofilm formation of a vaginal pathogen; inhibit the growth of an infant gastrointestinal pathogen; facilitate the adherence of a bacterial strain to VEC/IEC; inhibit the immune response signaling pathway; increases the integrity of a barrier comprising IEC; or a combination thereof. In some cases, while a bacterial strain (or the cultured medium thereof; or a bacterial product encompassed within that cultured medium) may not have a sufficient ability in a first disease associated function, the bacterial strain (or the cultured medium thereof; or a bacterial product encompassed within that cultured medium) may have a sufficient ability in a second disease associated function. Thus, a bacterial population comprising the bacterial strain can be combined with another bacterial strain (or the cultured medium thereof; or a bacterial product encompassed within that cultured medium) to generate a collective effect in the first and second disease associated functions as described herein. In such case, the another bacterial strain may have a sufficient ability in the first disease associated function; not a sufficient ability in the first disease associated function; have a sufficient ability in the second disease associated function; and/or not have a sufficient ability in the second disease associated function.

[0259] In some instances, the bacterial population comprising the plurality of bacterial strains described herein (or a cultured medium thereof) can have a collective effect on the disease associated function as described herein. In some instances, the plurality of the bacterial population described herein (or a cultured medium thereof) can have a collective effect on the vaginal disease-associated function as described herein. For example, the bacterial population comprising the plurality of bacterial strains described herein (or a cultured medium thereof) can have a collective effect(s) on at least one of the adherence to a vaginal epithelial cell (VEC), the inhibition of growth of a vaginal pathogen, the inhibition of a biofilm formation of a vaginal pathogen, a utilization of a vaginally relevant carbohydrate, or a combination thereof.

[0260] In some cases, at least one of the bacterial strains (or the cultured medium thereof; or a bacterial product encompassed within that cultured medium) of the bacterial population comprising at least two different bacterial strains having a collective interaction can have an adherence to a VEC that is at least about 0.001%, at least about 0.001%, at least about 0.01%, at least about 0.1%, at least about 1%, at least about 2%, at least about 3%, at least about 4%, at least about 5%, at least about 6%, at least about 7%, at least about 8%, at least about 9%, at least about 10%, at least about 20%, at least about 30%, at least about 40%, at least about 50%, at least about 60%, at least about 70%, at least about 80%, at least about 90%, at least about 100%, at least about 150%, at least about 2-fold, at least about 3-fold, at least about 4-fold, at least about 5-fold, at least about 6-fold, at least about 7-fold, at least about 8-fold, at least about 9-fold, at least about 10-fold, at least about 100-fold, at least about 1000-fold, at least about 10000-fold, at least about 100000-fold, or at least about 1000000-fold higher than that of either bacterial strain (or the cultured medium thereof; or a bacterial product encompassed within that cultured medium) of two bacterial populations comprising only one of the at least two different bacterial strains not cultured with the other bacterial strain or a cultured medium thereof. In some cases, at least one of the bacterial strains (or the cultured medium thereof; or a bacterial product encompassed within that cultured medium) of the bacterial population comprising at least two different bacterial strains having a collective interaction can have an adherence to a VEC that is at most about 0.001%, at most about 0.001%, at most about 0.01%, at most about 0.1%, at most about 1%, at most about 2%, at most about 3%, at most about 4%, at most about 5%, at most about 6%, at most about 7%, at most about 8%, at most about 9%, at most about 10%, at most about 20%, at most about 30%, at most about 40%, at most about 50%, at most about 60%, at most about 70%, at most about 80%, at most about 90%, at most about 100%, at most about 150%, at most about 2-fold, at most about 3-fold, at most about 4-fold, at most about 5-fold, at most about 6-fold, at most about 7-fold, at most about 8-fold, at most about 9-fold, at most about 10-fold, at most about 100-fold, at most about 1000-fold, at most about 10000-fold, at most about 100000-fold, or at most about 1000000-fold higher than that of either bacterial strain (or the cultured medium thereof; or a bacterial product encompassed within that cultured medium) of two bacterial populations comprising only one of the at least two different bacterial strains.

[0261] In some cases, at least one of the bacterial strains (or the cultured medium thereof; or a bacterial product encompassed within that cultured medium) of the bacterial population comprising at least two different bacterial strains having a collective interaction can exhibit an inhibition of the growth of a vaginal pathogen that is at least about 0.001%, at least about 0.001%, at least about 0.01%, at least about 0.1%, at least about 1%, at least about 2%, at least about 3%, at least about 4%, at least about 5%, at least about 6%, at least about 7%, at least about 8%, at least about 9%, at least about 10%, at least about 20%, at least about 30%, at least about 40%, at least about 50%, at least about 60%, at least about 70%, at least about 80%, at least about 90%, at least about 100%, at least about 150%, at least about 2-fold, at least about 3-fold, at least about 4-fold, at least about 5-fold, at least about 6-fold, at least about 7-fold, at least about 8-fold, at least about 9-fold, at least about 10-fold, at least about 100-fold, at least about 1000-fold, at least about 10000-fold, at least about 100000-fold, or at least about 1000000-fold higher than that of either bacterial strain (or the cultured medium thereof; or a bacterial product encompassed within that cultured medium) of two bacterial populations comprising only one of the at least two different bacterial strains not cultured with the other bacterial strain or a cultured medium thereof. In some cases, at least one of the bacterial strains (or the cultured medium thereof; or a bacterial product encompassed within that cultured medium) of the bacterial population comprising at least two different bacterial strains having a collective interaction can exhibit an inhibition of the growth of a vaginal pathogen that is at most about 0.001%, at most about 0.001%, at most about 0.01%, at most about 0.1%, at most about 1%, at most about 2%, at most about 3%, at most about 4%, at most about 5%, at most about 6%, at most about 7%, at most about 8%, at most about 9%, at most about 10%, at most about 20%, at most about 30%, at most about 40%, at most about 50%, at most about 60%, at most about 70%, at most about 80%, at most about 90%, at most about 100%, at most about 150%, at most about 2-fold, at most about 3-fold, at most about 4-fold, at most about 5-fold, at most about 6-fold, at most about 7-fold, at most about 8-fold, at most about 9-fold, at most about 10-fold, at most about 100-fold, at most about 1000-fold, at most about 10000-fold, at most about 100000-fold, or at most about 1000000-fold higher than that of either bacterial strain (or the cultured medium thereof; or a bacterial product encompassed within that cultured medium) of two bacterial populations comprising only one of the at least two different bacterial strains.

[0262] In some cases, the bacterial population comprising at least two different bacterial strains having a collective interaction can exhibit an inhibition of the growth of a vaginal pathogen that is at least about 0.001%, at least about 0.001%, at least about 0.010%, at least about 0.1%, at least about 1%, at least about 2%, at least about 3%, at least about 4%, at least about 5%, at least about 6%, at least about 7%, at least about 8%, at least about 9%, at least about 10%, at least about 20%, at least about 30%, at least about 40%, at least about 50%, at least about 60%, at least about 70%, at least about 80%, at least about 90%, at least about 100%, at least about 150%, at least about 2-fold, at least about 3-fold, at least about 4-fold, at least about 5-fold, at least about 6-fold, at least about 7-fold, at least about 8-fold, at least about 9-fold, at least about 10-fold, at least about 100-fold, at least about 1000-fold, at least about 10000-fold, at least about 100000-fold, or at least about 1000000-fold higher than that of either bacterial population comprising only one of the at least two different bacterial strains (or a bacterial population not comprising both of the two different bacterial strains). In some cases, the bacterial population comprising at least two different bacterial strains having a collective interaction having a collective interaction can exhibit an inhibition of the growth of a vaginal pathogen that is at most about 0.001%, at most about 0.001%, at most about 0.01%, at most about 0.1%, at most about 1%, at most about 2%, at most about 3%, at most about 4%, at most about 5%, at most about 6%, at most about 7%, at most about 8%, at most about 9%, at most about 10%, at most about 20%, at most about 30%, at most about 40%, at most about 50%, at most about 60%, at most about 70%, at most about 80%, at most about 90%, at most about 100%, at most about 150%, at most about 2-fold, at most about 3-fold, at most about 4-fold, at most about 5-fold, at most about 6-fold, at most about 7-fold, at most about 8-fold, at most about 9-fold, at most about 10-fold, at most about 100-fold, at most about 1000-fold, at most about 10000-fold, at most about 100000-fold, or at most about 1000000-fold higher that of either bacterial population comprising only one of the at least two different bacterial strains (or a bacterial population not comprising both of the two different bacterial strains).

[0263] In some cases, at least one of the bacterial strains (or the cultured medium thereof; or a bacterial product encompassed within that cultured medium) of the bacterial population comprising at least two different bacterial strains having a collective interaction can exhibit an inhibition of the biofilm of a vaginal pathogen that is at least about 0.001%, at least about 0.001%, at least about 0.01%, at least about 0.1%, at least about 1%, at least about 2%, at least about 3%, at least about 4%, at least about 5%, at least about 6%, at least about 7%, at least about 8%, at least about 9%, at least about 10%, at least about 20%, at least about 30%, at least about 40%, at least about 50%, at least about 60%, at least about 70%, at least about 80%, at least about 90%, at least about 100%, at least about 150%, at least about 2-fold, at least about 3-fold, at least about 4-fold, at least about 5-fold, at least about 6-fold, at least about 7-fold, at least about 8-fold, at least about 9-fold, at least about 10-fold, at least about 100-fold, at least about 1000-fold, at least about 10000-fold, at least about 100000-fold, or at least about 1000000-fold higher than that of either bacterial strain (or the cultured medium thereof; or a bacterial product encompassed within that cultured medium) of two bacterial populations comprising only one of the at least two different bacterial strains not cultured with the other bacterial strain or a cultured medium thereof. In some cases, at least one of the bacterial strains (or the cultured medium thereof; or a bacterial product encompassed within that cultured medium) of the bacterial population comprising at least two different bacterial strains having a collective interaction can exhibit an inhibition of the biofilm of a vaginal pathogen that is at most about 0.001%, at most about 0.001%, at most about 0.01%, at most about 0.1%, at most about 1%, at most about 2%, at most about 3%, at most about 4%, at most about 5%, at most about 6%, at most about 7%, at most about 8%, at most about 9%, at most about 10%, at most about 20%, at most about 30%, at most about 40%, at most about 50%, at most about 60%, at most about 70%, at most about 80%, at most about 90%, at most about 100%, at most about 150%, at most about 2-fold, at most about 3-fold, at most about 4-fold, at most about 5-fold, at most about 6-fold, at most about 7-fold, at most about 8-fold, at most about 9-fold, at most about 10-fold, at most about 100-fold, at most about 1000-fold, at most about 10000-fold, at most about 100000-fold, or at most about 1000000-fold higher than that of either bacterial strain (or the cultured medium thereof; or a bacterial product encompassed within that cultured medium) of two bacterial populations comprising only one of the at least two different bacterial strains.

[0264] In some cases, the bacterial population comprising at least two different bacterial strains having a collective interaction can exhibit an inhibition of the biofilm formation of a vaginal pathogen that is at least about 0.001%, at least about 0.001%, at least about 0.01%, at least about 0.1%, at least about 1%, at least about 2%, at least about 3%, at least about 4%, at least about 5%, at least about 6%, at least about 7%, at least about 8%, at least about 9%, at least about 10%, at least about 20%, at least about 30%, at least about 40%, at least about 50%, at least about 60%, at least about 70%, at least about 80%, at least about 90%, at least about 100%, at least about 150%, at least about 2-fold, at least about 3-fold, at least about 4-fold, at least about 5-fold, at least about 6-fold, at least about 7-fold, at least about 8-fold, at least about 9-fold, at least about 10-fold, at least about 100-fold, at least about 1000-fold, at least about 10000-fold, at least about 100000-fold, or at least about 1000000-fold higher than that of either bacterial population comprising only one of the at least two different bacterial strains (or a bacterial population not comprising both of the two different bacterial strains). In some cases, the bacterial population comprising at least two different bacterial strains having a collective interaction can exhibit an inhibition of the biofilm formation of a vaginal pathogen that is at most about 0.001%, at most about 0.001%, at most about 0.01%, at most about 0.1%, at most about 1%, at most about 2%, at most about 3%, at most about 4%, at most about 5%, at most about 6%, at most about 7%, at most about 8%, at most about 9%, at most about 10%, at most about 20%, at most about 30%, at most about 40%, at most about 50%, at most about 60%, at most about 70%, at most about 80%, at most about 90%, at most about 100%, at most about 150%, at most about 2-fold, at most about 3-fold, at most about 4-fold, at most about 5-fold, at most about 6-fold, at most about 7-fold, at most about 8-fold, at most about 9-fold, at most about 10-fold, at most about 100-fold, at most about 1000-fold, at most about 10000-fold, at most about 100000-fold, or at most about 1000000-fold higher that of either bacterial population comprising only one of the at least two different bacterial strains (or a bacterial population not comprising both of the two different bacterial strains).

[0265] In some cases, at least one of bacterial strains of the bacterial population (or the cultured medium thereof; or a bacterial product encompassed within that cultured medium) comprising at least two different bacterial strains having a collective interaction can have a vaginally relevant carbohydrate growth (for example, for glycogen, bioglycogen, dextrin, or maltodextrin) ratio that is at least about 0.001%, at least about 0.001%, at least about 0.010%, at least about 0.1%, at least about 1%, at least about 2%, at least about 3%, at least about 4%, at least about 5%, at least about 6%, at least about 7%, at least about 8%, at least about 9%, at least about 10%, at least about 20%, at least about 30%, at least about 40%, at least about 50%, at least about 60%, at least about 70%, at least about 80%, at least about 90%, at least about 100%, at least about 150%, at least about 2-fold, at least about 3-fold, at least about 4-fold, at least about 5-fold, at least about 6-fold, at least about 7-fold, at least about 8-fold, at least about 9-fold, at least about 10-fold, at least about 100-fold, at least about 1000-fold, at least about 10000-fold, at least about 100000-fold, or at least about 1000000-fold higher than that of either bacterial strain of two bacterial populations comprising only one of the at least two different bacterial strains not cultured with the other bacterial strain (or the cultured medium thereof; or a bacterial product encompassed within that cultured medium). In some cases, at least one of bacterial strains (or the cultured medium thereof; or a bacterial product encompassed within that cultured medium) of the bacterial population comprising at least two different bacterial strains having a collective interaction can have a vaginally relevant carbohydrate growth (for example, for glycogen, bioglycogen, dextrin, or maltodextrin) ratio that is at most about 0.001%, at most about 0.001%, at most about 0.01%, at most about 0.1%, at most about 1%, at most about 2%, at most about 3%, at most about 4%, at most about 5%, at most about 6%, at most about 7%, at most about 8%, at most about 9%, at most about 10%, at most about 20%, at most about 30%, at most about 40%, at most about 50%, at most about 60%, at most about 70%, at most about 80%, at most about 90%, at most about 100%, at most about 150%, at most about 2-fold, at most about 3-fold, at most about 4-fold, at most about 5-fold, at most about 6-fold, at most about 7-fold, at most about 8-fold, at most about 9-fold, at most about 10-fold, at most about 100-fold, at most about 1000-fold, at most about 10000-fold, at most about 100000-fold, or at most about 1000000-fold higher than that of either bacterial strain of two bacterial populations comprising only one of the at least two different bacterial strains not cultured with the other bacterial strain (or the cultured medium thereof; or a bacterial product encompassed within that cultured medium).

[0266] In some cases, at least one of bacterial strains (or the cultured medium thereof; or a bacterial product encompassed within that cultured medium) of the bacterial population comprising at least two different bacterial strains having a collective interaction can have a vaginal pH/physiological pH growth ratio that is at least about 0.001%, at least about 0.001%, at least about 0.01%, at least about 0.1%, at least about 1%, at least about 2%, at least about 3%, at least about 4%, at least about 5%, at least about 6%, at least about 7%, at least about 8%, at least about 9%, at least about 10%, at least about 20%, at least about 30%, at least about 40%, at least about 50%, at least about 60%, at least about 70%, at least about 80%, at least about 90%, at least about 100%, at least about 150%, at least about 2-fold, at least about 3-fold, at least about 4-fold, at least about 5-fold, at least about 6-fold, at least about 7-fold, at least about 8-fold, at least about 9-fold, at least about 10-fold, at least about 100-fold, at least about 1000-fold, at least about 10000-fold, at least about 100000-fold, or at least about 1000000-fold higher than that of either bacterial strain of two bacterial populations comprising only one of the at least two different bacterial strains not cultured with the other bacterial strain (or the cultured medium thereof; or a bacterial product encompassed within that cultured medium). In some cases, at least one of bacterial strains (or the cultured medium thereof; or a bacterial product encompassed within that cultured medium) of the bacterial population comprising at most two different bacterial strains having a collective interaction can have a vaginal pH/physiological pH growth ratio that is at most about 0.001%, at most about 0.001%, at most about 0.01%, at most about 0.1%, at most about 1%, at most about 2%, at most about 3%, at most about 4%, at most about 5%, at most about 6%, at most about 7%, at most about 8%, at most about 9%, at most about 10%, at most about 20%, at most about 30%, at most about 40%, at most about 50%, at most about 60%, at most about 70%, at most about 80%, at most about 90%, at most about 100%, at most about 150%, at most about 2-fold, at most about 3-fold, at most about 4-fold, at most about 5-fold, at most about 6-fold, at most about 7-fold, at most about 8-fold, at most about 9-fold, at most about 10-fold, at most about 100-fold, at most about 1000-fold, at most about 10000-fold, at most about 100000-fold, or at most about 1000000-fold higher than that of either bacterial strain of two bacterial populations comprising only one of the at least two different bacterial strains not cultured with the other bacterial strain (or the cultured medium thereof; or a bacterial product encompassed within that cultured medium).

[0267] In some cases, the bacterial population comprising at least two different bacterial strains having a collective interaction can generate at least about at least about 0.001%, at least about 0.001%, at least about 0.01%, at least about 0.1%, at least about 1%, at least about 2%, at least about 3%, at least about 4%, at least about 5%, at least about 6%, at least about 7%, at least about 8%, at least about 9%, at least about 10%, at least about 20%, at least about 30%, at least about 40%, at least about 50%, at least about 60%, at least about 70%, at least about 80%, at least about 90%, at least about 100%, at least about 150%, at least about 2-fold, at least about 3-fold, at least about 4-fold, at least about 5-fold, at least about 6-fold, at least about 7-fold, at least about 8-fold, at least about 9-fold, at least about 10-fold, at least about 100-fold, at least about 1000-fold, at least about 10000-fold, at least about 100000-fold, or at least about 1000000-fold more hydrogen peroxide than that of either bacterial population comprising only one of the at least two different bacterial strains (or a bacterial population not comprising both of the two different bacterial strains). In some cases, the bacterial population comprising at least two different bacterial strains having a collective interaction can exhibit an inhibition of the biofilm formation of a vaginal pathogen that is at most about 0.001%, at most about 0.001%, at most about 0.010%, at most about 0.1%, at most about 1%, at most about 2%, at most about 3%, at most about 4%, at most about 5%, at most about 6%, at most about 7%, at most about 8%, at most about 9%, at most about 10%, at most about 20%, at most about 30%, at most about 40%, at most about 50%, at most about 60%, at most about 70%, at most about 80%, at most about 90%, at most about 100%, at most about 150%, at most about 2-fold, at most about 3-fold, at most about 4-fold, at most about 5-fold, at most about 6-fold, at most about 7-fold, at most about 8-fold, at most about 9-fold, at most about 10-fold, at most about 100-fold, at most about 1000-fold, at most about 10000-fold, at most about 100000-fold, or at most about 1000000-fold more hydrogen peroxide than that of either bacterial population comprising only one of the at least two different bacterial strains (or a bacterial population not comprising both of the two different bacterial strains).

[0268] In some cases, at least one of bacterial strains (or the cultured medium thereof; or a bacterial product encompassed within that cultured medium) of the bacterial population comprising at least two different bacterial strains having a collective interaction can generate at least about 0.001%, at least about 0.001%, at least about 0.01%, at least about 0.1%, at least about 1%, at least about 2%, at least about 3%, at least about 4%, at least about 5%, at least about 6%, at least about 7%, at least about 8%, at least about 9%, at least about 10%, at least about 20%, at least about 30%, at least about 40%, at least about 50%, at least about 60%, at least about 70%, at least about 80%, at least about 90%, at least about 100%, at least about 150%, at least about 2-fold, at least about 3-fold, at least about 4-fold, at least about 5-fold, at least about 6-fold, at least about 7-fold, at least about 8-fold, at least about 9-fold, at least about 10-fold, at least about 100-fold, at least about 1000-fold, at least about 10000-fold, at least about 100000-fold, or at least about 1000000-fold more lactic acids than that (when measured by methods described in EXAMPLE 2) of either bacterial strain of two bacterial populations comprising only one of the at least two different bacterial strains not cultured with the other bacterial strain (or the cultured medium thereof; or a bacterial product encompassed within that cultured medium). In some cases, at least one of bacterial strains (or the cultured medium thereof; or a bacterial product encompassed within that cultured medium) of the bacterial population comprising at most two different bacterial strains having a collective interaction can generate at most about 0.001%, at most about 0.001%, at most about 0.010%, at most about 0.1%, at most about 1%, at most about 2%, at most about 3%, at most about 4%, at most about 5%, at most about 6%, at most about 7%, at most about 8%, at most about 9%, at most about 10%, at most about 20%, at most about 30%, at most about 40%, at most about 50%, at most about 60%, at most about 70%, at most about 80%, at most about 90%, at most about 100%, at most about 150%, at most about 2-fold, at most about 3-fold, at most about 4-fold, at most about 5-fold, at most about 6-fold, at most about 7-fold, at most about 8-fold, at most about 9-fold, at most about 10-fold, at most about 100-fold, at most about 1000-fold, at most about 10000-fold, at most about 100000-fold, or at most about 1000000-fold more lactic acids than that (when measured by methods described in EXAMPLE 2) of either bacterial strain of two bacterial populations comprising only one of the at least two different bacterial strains not cultured with the other bacterial strain (or the cultured medium thereof; or a bacterial product encompassed within that cultured medium).

[0269] In some instances, the plurality of the bacterial population described herein can have a collective effect on the infant gastrointestinal disease-associated function as described herein. For example, the bacterial population comprising at least two different bacterial strains having a collective interaction can have a collective effect(s) on at least one of the adherence to IEC, an integrity of a barrier comprising IEC, an inhibition of an infant gastrointestinal pathogen, a utilization of an infant-relevant carbohydrate, an inhibition of an immune response, or a combination thereof.

[0270] In some cases, one of the bacterial strains (or the cultured medium thereof; or a bacterial product encompassed within that cultured medium) of the bacterial population comprising at least two different bacterial strains having a collective interaction can have an adherence to an IEC that is at least about 0.001%, at least about 0.001%, at least about 0.01%, at least about 0.1%, at least about 1%, at least about 2%, at least about 3%, at least about 4%, at least about 5%, at least about 6%, at least about 7%, at least about 8%, at least about 9%, at least about 10%, at least about 20%, at least about 30%, at least about 40%, at least about 50%, at least about 60%, at least about 70%, at least about 80%, at least about 90%, at least about 100%, at least about 150%, at least about 2-fold, at least about 3-fold, at least about 4-fold, at least about 5-fold, at least about 6-fold, at least about 7-fold, at least about 8-fold, at least about 9-fold, at least about 10-fold, at least about 100-fold, at least about 1000-fold, at least about 10000-fold, at least about 100000-fold, or at least about 1000000-fold higher than that of either bacterial strain (or the cultured medium thereof; or a bacterial product encompassed within that cultured medium) of two bacterial populations comprising only one of the at least two different bacterial strains not cultured with the other bacterial strain or a cultured medium thereof. In some cases, one of the bacterial strains (or the cultured medium thereof; or a bacterial product encompassed within that cultured medium) of the bacterial population comprising at least two different bacterial strains having a collective interaction can have an adherence to an IEC that is at most about 0.001%, at most about 0.001%, at most about 0.01%, at most about 0.1%, at most about 1%, at most about 2%, at most about 3%, at most about 4%, at most about 5%, at most about 6%, at most about 7%, at most about 8%, at most about 9%, at most about 10%, at most about 20%, at most about 30%, at most about 40%, at most about 50%, at most about 60%, at most about 70%, at most about 80%, at most about 90%, at most about 100%, at most about 150%, at most about 2-fold, at most about 3-fold, at most about 4-fold, at most about 5-fold, at most about 6-fold, at most about 7-fold, at most about 8-fold, at most about 9-fold, at most about 10-fold, at most about 100-fold, at most about 1000-fold, at most about 10000-fold, at most about 100000-fold, or at most about 1000000-fold higher than that of either bacterial strain (or the cultured medium thereof; or a bacterial product encompassed within that cultured medium) of two bacterial populations comprising only one of the at least two different bacterial strains.

[0271] In some cases, one of the bacterial strains (or the cultured medium thereof; or a bacterial product encompassed within that cultured medium) of the bacterial population comprising at least two different bacterial strains having a collective interaction can exhibit an inhibition of the growth of an infant gastrointestinal pathogen that is at least about 0.001%, at least about 0.001%, at least about 0.01%, at least about 0.1%, at least about 1%, at least about 2%, at least about 3%, at least about 4%, at least about 5%, at least about 6%, at least about 7%, at least about 8%, at least about 9%, at least about 10%, at least about 20%, at least about 30%, at least about 40%, at least about 50%, at least about 60%, at least about 70%, at least about 80%, at least about 90%, at least about 100%, at least about 150%, at least about 2-fold, at least about 3-fold, at least about 4-fold, at least about 5-fold, at least about 6-fold, at least about 7-fold, at least about 8-fold, at least about 9-fold, at least about 10-fold, at least about 100-fold, at least about 1000-fold, at least about 10000-fold, at least about 100000-fold, or at least about 1000000-fold higher than that of either bacterial strain (or the cultured medium thereof; or a bacterial product encompassed within that cultured medium) of two bacterial populations comprising only one of the at least two different bacterial strains not cultured with the other bacterial strain or a cultured medium thereof. In some cases, one of the bacterial strains (or the cultured medium thereof; or a bacterial product encompassed within that cultured medium) of the bacterial population comprising at least two different bacterial strains having a collective interaction can exhibit an inhibition of the growth of an infant gastrointestinal pathogen that is at most about 0.001%, at most about 0.001%, at most about 0.01%, at most about 0.1%, at most about 1%, at most about 2%, at most about 3%, at most about 4%, at most about 5%, at most about 6%, at most about 7%, at most about 8%, at most about 9%, at most about 10%, at most about 20%, at most about 30%, at most about 40%, at most about 50%, at most about 60%, at most about 70%, at most about 80%, at most about 90%, at most about 100%, at most about 150%, at most about 2-fold, at most about 3-fold, at most about 4-fold, at most about 5-fold, at most about 6-fold, at most about 7-fold, at most about 8-fold, at most about 9-fold, at most about 10-fold, at most about 100-fold, at most about 1000-fold, at most about 10000-fold, at most about 100000-fold, or at most about 1000000-fold higher than that of either bacterial strain (or the cultured medium thereof; or a bacterial product encompassed within that cultured medium) of two bacterial populations comprising only one of the at most two different bacterial strains.

[0272] In some cases, the bacterial population comprising at least two different bacterial strains having a collective interaction can exhibit an inhibition of the growth of an infant gastrointestinal pathogen that is at least about 0.001%, at least about 0.001%, at least about 0.010%, at least about 0.1%, at least about 1%, at least about 2%, at least about 3%, at least about 4%, at least about 5%, at least about 6%, at least about 7%, at least about 8%, at least about 9%, at least about 10%, at least about 20%, at least about 30%, at least about 40%, at least about 50%, at least about 60%, at least about 70%, at least about 80%, at least about 90%, at least about 100%, at least about 150%, at least about 2-fold, at least about 3-fold, at least about 4-fold, at least about 5-fold, at least about 6-fold, at least about 7-fold, at least about 8-fold, at least about 9-fold, at least about 10-fold, at least about 100-fold, at least about 1000-fold, at least about 10000-fold, at least about 100000-fold, or at least about 1000000-fold higher than that of either bacterial population comprising only one of the at least two different bacterial strains (or a bacterial population not comprising both of the two different bacterial strains). In some cases, the bacterial population comprising at least two different bacterial strains having a collective interaction can exhibit an inhibition of the growth of an infant gastrointestinal pathogen that is at most about 0.001%, at most about 0.001%, at most about 0.01%, at most about 0.1%, at most about 1%, at most about 2%, at most about 3%, at most about 4%, at most about 5%, at most about 6%, at most about 7%, at most about 8%, at most about 9%, at most about 10%, at most about 20%, at most about 30%, at most about 40%, at most about 50%, at most about 60%, at most about 70%, at most about 80%, at most about 90%, at most about 100%, at most about 150%, at most about 2-fold, at most about 3-fold, at most about 4-fold, at most about 5-fold, at most about 6-fold, at most about 7-fold, at most about 8-fold, at most about 9-fold, at most about 10-fold, at most about 100-fold, at most about 1000-fold, at most about 10000-fold, at most about 100000-fold, or at most about 1000000-fold higher that of either bacterial population comprising only one of the at least two different bacterial strains (or a bacterial population not comprising both of the two different bacterial strains).

[0273] In some cases, the bacterial population comprising at least two different bacterial strains having a collective interaction may increase the cellular impedance of a barrier comprising IEC by at least about 0.001%, at least about 0.001%, at least about 0.01%, at least about 0.1%, at least about 1%, at least about 2%, at least about 3%, at least about 4%, at least about 5%, at least about 6%, at least about 7%, at least about 8%, at least about 9%, at least about 10%, at least about 20%, at least about 30%, at least about 40%, at least about 50%, at least about 60%, at least about 70%, at least about 80%, at least about 90%, at least about 100%, at least about 150%, at least about 2-fold, at least about 3-fold, at least about 4-fold, at least about 5-fold, at least about 6-fold, at least about 7-fold, at least about 8-fold, at least about 9-fold, at least about 10-fold, at least about 100-fold, at least about 1000-fold, at least about 10000-fold, at least about 100000-fold, or at least about 1000000-fold higher than that of either bacterial population comprising only one of the at least two different bacterial strains (or a bacterial population not comprising both of the two different bacterial strains). In some cases, the bacterial population comprising at most two different bacterial strains having a collective interaction may increase the cellular impedance of a barrier comprising IEC by at most about 0.001%, at most about 0.001%, at most about 0.01%, at most about 0.1%, at most about 1%, at most about 2%, at most about 3%, at most about 4%, at most about 5%, at most about 6%, at most about 7%, at most about 8%, at most about 9%, at most about 10%, at most about 20%, at most about 30%, at most about 40%, at most about 50%, at most about 60%, at most about 70%, at most about 80%, at most about 90%, at most about 100%, at most about 150%, at most about 2-fold, at most about 3-fold, at most about 4-fold, at most about 5-fold, at most about 6-fold, at most about 7-fold, at most about 8-fold, at most about 9-fold, at most about 10-fold, at most about 100-fold, at most about 1000-fold, at most about 10000-fold, at most about 100000-fold, or at most about 1000000-fold higher than that of either bacterial population comprising only one of the at most two different bacterial strains (or a bacterial population not comprising both of the two different bacterial strains).

[0274] In some cases, one of the bacterial strains (or the cultured medium thereof; or a bacterial product encompassed within that cultured medium) of the bacterial population comprising at least two different bacterial strains having a collective interaction can increase the cellular impedance of a barrier comprising IEC by at least about 0.001%, at least about 0.001%, at least about 0.01%, at least about 0.1%, at least about 1%, at least about 2%, at least about 3%, at least about 4%, at least about 5%, at least about 6%, at least about 7%, at least about 8%, at least about 9%, at least about 10%, at least about 20%, at least about 30%, at least about 40%, at least about 50%, at least about 60%, at least about 70%, at least about 80%, at least about 90%, at least about 100%, at least about 150%, at least about 2-fold, at least about 3-fold, at least about 4-fold, at least about 5-fold, at least about 6-fold, at least about 7-fold, at least about 8-fold, at least about 9-fold, at least about 10-fold, at least about 100-fold, at least about 1000-fold, at least about 10000-fold, at least about 100000-fold, or at least about 1000000-fold higher than that of either bacterial strain (or the cultured medium thereof; or a bacterial product encompassed within that cultured medium) of two bacterial populations comprising only one of the at least two different bacterial strains not cultured with the other bacterial strain or a cultured medium thereof. In some cases, one of the bacterial strains (or the cultured medium thereof; or a bacterial product encompassed within that cultured medium) of the bacterial population comprising at most two different bacterial strains having a collective interaction can increase the cellular impedance of a barrier comprising IEC by at most about 0.001%, at most about 0.001%, at most about 0.010%, at most about 0.1%, at most about 1%, at most about 2%, at most about 3%, at most about 4%, at most about 5%, at most about 6%, at most about 7%, at most about 8%, at most about 9%, at most about 10%, at most about 20%, at most about 30%, at most about 40%, at most about 50%, at most about 60%, at most about 70%, at most about 80%, at most about 90%, at most about 100%, at most about 150%, at most about 2-fold, at most about 3-fold, at most about 4-fold, at most about 5-fold, at most about 6-fold, at most about 7-fold, at most about 8-fold, at most about 9-fold, at most about 10-fold, at most about 100-fold, at most about 1000-fold, at most about 10000-fold, at most about 100000-fold, or at most about 1000000-fold higher than that of either bacterial strain (or the cultured medium thereof; or a bacterial product encompassed within that cultured medium) of two bacterial populations comprising only one of the at most two different bacterial strains not cultured with the other bacterial strain or a cultured medium thereof.

[0275] In some cases, one of the bacterial strains (or the cultured medium thereof; or a bacterial product encompassed within that cultured medium) of the bacterial population comprising at least two different bacterial strains having a collective interaction can exhibit an inhibition of the immune response signaling pathway (for example, any immune response signaling pathway described herein or TLR4) that is at least about 0.001%, at least about 0.001%, at least about 0.01%, at least about 0.1%, at least about 1%, at least about 2%, at least about 3%, at least about 4%, at least about 5%, at least about 6%, at least about 7%, at least about 8%, at least about 9%, at least about 10%, at least about 20%, at least about 30%, at least about 40%, at least about 50%, at least about 60%, at least about 70%, at least about 80%, at least about 90%, at least about 100%, at least about 150%, at least about 2-fold, at least about 3-fold, at least about 4-fold, at least about 5-fold, at least about 6-fold, at least about 7-fold, at least about 8-fold, at least about 9-fold, at least about 10-fold, at least about 100-fold, at least about 1000-fold, at least about 10000-fold, at least about 100000-fold, or at least about 1000000-fold higher than that of either bacterial strain (or the cultured medium thereof; or a bacterial product encompassed within that cultured medium) of two bacterial populations comprising only one of the at least two different bacterial strains not cultured with the other bacterial strain or a cultured medium thereof. In some cases, one of the bacterial strains (or the cultured medium thereof; or a bacterial product encompassed within that cultured medium) of the bacterial population comprising at least two different bacterial strains having a collective interaction can exhibit an inhibition of the immune response signaling pathway that is at most about 0.001%, at most about 0.001%, at most about 0.010%, at most about 0.1%, at most about 1%, at most about 2%, at most about 3%, at most about 4%, at most about 5%, at most about 6%, at most about 7%, at most about 8%, at most about 9%, at most about 10%, at most about 20%, at most about 30%, at most about 40%, at most about 50%, at most about 60%, at most about 70%, at most about 80%, at most about 90%, at most about 100%, at most about 150%, at most about 2-fold, at most about 3-fold, at most about 4-fold, at most about 5-fold, at most about 6-fold, at most about 7-fold, at most about 8-fold, at most about 9-fold, at most about 10-fold, at most about 100-fold, at most about 1000-fold, at most about 10000-fold, at most about 100000-fold, or at most about 1000000-fold higher than that of either bacterial strain (or the cultured medium thereof; or a bacterial product encompassed within that cultured medium) of two bacterial populations comprising only one of the at most two different bacterial strains.

[0276] In some cases, the bacterial population comprising at least two different bacterial strains having a collective interaction can exhibit an inhibition of the immune response signaling pathway of an infant gastrointestinal pathogen that is at least about 0.001%, at least about 0.001%, at least about 0.01%, at least about 0.1%, at least about 1%, at least about 2%, at least about 3%, at least about 4%, at least about 5%, at least about 6%, at least about 7%, at least about 8%, at least about 9%, at least about 10%, at least about 20%, at least about 30%, at least about 40%, at least about 50%, at least about 60%, at least about 70%, at least about 80%, at least about 90%, at least about 100%, at least about 150%, at least about 2-fold, at least about 3-fold, at least about 4-fold, at least about 5-fold, at least about 6-fold, at least about 7-fold, at least about 8-fold, at least about 9-fold, at least about 10-fold, at least about 100-fold, at least about 1000-fold, at least about 10000-fold, at least about 100000-fold, or at least about 1000000-fold higher than that of either bacterial population comprising only one of the at least two different bacterial strains (or a bacterial population not comprising both of the two different bacterial strains). In some cases, the bacterial population comprising at least two different bacterial strains having a collective interaction can exhibit an inhibition of the immune response signaling pathway that is at most about 0.001%, at most about 0.001%, at most about 0.010%, at most about 0.1%, at most about 1%, at most about 2%, at most about 3%, at most about 4%, at most about 5%, at most about 6%, at most about 7%, at most about 8%, at most about 9%, at most about 10%, at most about 20%, at most about 30%, at most about 40%, at most about 50%, at most about 60%, at most about 70%, at most about 80%, at most about 90%, at most about 100%, at most about 150%, at most about 2-fold, at most about 3-fold, at most about 4-fold, at most about 5-fold, at most about 6-fold, at most about 7-fold, at most about 8-fold, at most about 9-fold, at most about 10-fold, at most about 100-fold, at most about 1000-fold, at most about 10000-fold, at most about 100000-fold, or at most about 1000000-fold higher that of either bacterial population comprising only one of the at least two different bacterial strains (or a bacterial population not comprising both of the two different bacterial strains).

[0277] In some cases, at least one of bacterial strains of the bacterial population comprising at least two different bacterial strains having a collective interaction can have an infant gastrointestinally relevant carbohydrate growth (for example, any HMOs as described herein, 2′FL, or LNT) ratio that is at least about 0.001%, at least about 0.001%, at least about 0.01%, at least about 0.1%, at least about 1%, at least about 2%, at least about 3%, at least about 4%, at least about 5%, at least about 6%, at least about 7%, at least about 8%, at least about 9%, at least about 10%, at least about 20%, at least about 30%, at least about 40%, at least about 50%, at least about 60%, at least about 70%, at least about 80%, at least about 90%, at least about 100%, at least about 150%, at least about 2-fold, at least about 3-fold, at least about 4-fold, at least about 5-fold, at least about 6-fold, at least about 7-fold, at least about 8-fold, at least about 9-fold, at least about 10-fold, at least about 100-fold, at least about 1000-fold, at least about 10000-fold, at least about 100000-fold, or at least about 1000000-fold higher than that of either bacterial strain of two bacterial populations comprising only one of the at least two different bacterial strains not cultured with the other bacterial strain. In some cases, at most one of bacterial strains of the bacterial population comprising at most two different bacterial strains having a collective interaction can have an infant gastrointestinally relevant carbohydrate growth (for example, any HMOs as described herein, 2′FL, or LNT) ratio that is at most about 0.001%, at most about 0.001%, at most about 0.01%, at most about 0.1%, at most about 1%, at most about 2%, at most about 3%, at most about 4%, at most about 5%, at most about 6%, at most about 7%, at most about 8%, at most about 9%, at most about 10%, at most about 20%, at most about 30%, at most about 40%, at most about 50%, at most about 60%, at most about 70%, at most about 80%, at most about 90%, at most about 100%, at most about 150%, at most about 2-fold, at most about 3-fold, at most about 4-fold, at most about 5-fold, at most about 6-fold, at most about 7-fold, at most about 8-fold, at most about 9-fold, at most about 10-fold, at most about 100-fold, at most about 1000-fold, at most about 10000-fold, at most about 100000-fold, or at most about 1000000-fold higher than that of either bacterial strain of two bacterial populations comprising only one of the at most two different bacterial strains not cultured with the other bacterial strain.

[0278] In some cases, a first bacterial strain when present in a medium comprising the energy source and a second bacterial strain (different from the first bacterial strain) or its supernatant exhibits a growth of at least about 105% by weight as compared to the growth of the first bacterial strain when present in a medium comprising the energy source in an absence of the second bacterial strain or its supernatant. In some embodiments, the energy source for syntrophy can comprise starch. In some embodiments, the energy source for syntrophy does not comprise starch. The first bacterial strain may be present in the media with the energy source and second bacterial strain, or the supernatant of the second bacterial strain. In some embodiments, the supernatant derived from the bacterial strain can be free of cells, or it can contain a fermented derivative product of the bacterial strain. In some embodiments, the first strain can utilize the energy source to grow to at least 101%, 105%, 110%, 115%, 120%, 130%, 140% 150%, 160%, 170%, 180%, 190%, 200%, 250%, 300%, 350%, 400%, 450%, 500%, 550%, 600%, 650%, 700%, 750%, 800%, 850%, 900%, 950%, 999%, 1000%, 1100%, or more than 1100% by weight when compared to the growth of that first bacterial strain in medium with that energy source absent the bacterial strain or its supernatant for at most 48 hours, 24 hours, or 12 hours. In some embodiments, the first strain can utilize the energy source to grow to at least about 1200%, 1300%, 1400%, 1500%, 1600%, 1700%, 1800%, 1900%, 2000%, 3000%, 4000%, 5000%, 6000%, 7000%, 8000%, 9000%, 9999%, 10000% or more than about 10000% by weight when compared to the growth of that first bacterial strain in medium with that energy source absent the bacterial strain or its supernatant for at most 48 hours, 24 hours, or 12 hours.

[0279] In some embodiments, the energy source of the medium can include a modified starch, fermented starch, dextrin, maltodextrin, fructooligosaccharides (FOS), guar gum, corn syrup, polydextrose, Galacto-Oligosaccharides (GOS), lactose, inulin, mucin, sialic acid, glucan, fructose, N-Acetylglucosamine (GlcNAc), mannose, Lacto-N-neotetraose (LNnT), glucose, 2′-Fucosyllactose (2′-FL), galactose, fructose, pectin, or starch, or a combination thereof.

[0280] In some embodiments, the starch can comprise a modified starch, fermented starch, maltodextrin, or combination thereof.

[0281] In some embodiments, the first bacterial strain and/or the bacterial strain can include Lactobacillus, sp. and/or at least one or more strains of Bifidobacterium sp., and/or at least one strain of Akkermansia sp., and/or at least one or more strains of Blautia sp. and/or at least one or more strains of Clostridium sp., and/or at least one or more strains of Coprococcus sp., and/or at least one or more strains of Dorea sp., and/or at least one or more strains of Faecalibacterium sp., and/or at least one or more strains of Roseburia sp., and/or at least one or more strains of Ruminococcus sp., or a combination thereof.

[0282] In some embodiments, the first bacterial strain can proliferate for at least about 4 cell divisions within at most 72 hours, 60 hours, 48 hours, 36 hours, 24 hours, 12 hours, 6 hours, or 4 hours. In some embodiments, the supernatant can be cell-free. In some embodiments, the first bacterial strain can proliferate for at least about 8 cell divisions within at most 72 hours, 60 hours, 48 hours, 36 hours, 24 hours, 12 hours, 6 hours, or 4 hours. In some embodiments, the supernatant can be cell-free. In some embodiments, the first bacterial strain can proliferate for at least about 16 cell divisions within at most 72 hours, 60 hours, 48 hours, 36 hours, 24 hours, 12 hours, 6 hours, or 4 hours. In some embodiments, the supernatant can be cell-free. In some embodiments, the first bacterial strain can proliferate for at least about 32 cell divisions within at most 72 hours, 60 hours, 48 hours, 36 hours, 24 hours, 12 hours, 6 hours, or 4 hours.

[0283] In some embodiments, the pharmaceutical composition can comprise a different first and second bacterial strain, a medium that can include a secreted metabolite (or bacterial product) derived from the second bacterial strain, and a layer of epithelial cells. In some embodiments, the secreted metabolites (or bacterial product) derived from the second bacterial strain can decrease the gas permeability of the layer of epithelial cells by at least about 1%, 5%, 10%, 20%, 30%, 40%, 50%, 60%, 70%, 80%, 90%, or 99% compared to a layer of epithelial cells combined with a medium that can comprise the first bacterial strain in the absence of metabolites (or bacterial product) derived from the second bacterial strain. In some embodiments, the supernatant can be cell-free, or a fermentation product derived from the second bacterial strain. In some embodiments, the gas permeability of the epithelial cells can be measured by the transport of Fluorescein isothiocyanate (FITC)-conjugated dextran across the layer of epithelial cells.

[0284] In some embodiments, the epithelial cells can be mammalian epithelial cells or specifically human epithelial cells.

[0285] In some embodiments, the supernatant derived from the second bacterial strain can be cell-free, comprised of a fermentation product, or contain a secreted metabolite (or bacterial product) or inviable cell derived from the second bacterial strain. In some embodiments, the metabolite (or bacterial product) or inviable cell can be combined with an engineered cell comprising a reporter, and can decrease the signal of the reporter by at least about 1%, 5%, 10%, 20%, 30%, 40%, 50%, 60%, 70%, 80%, 90%, or 99% as compared to a signal of the reporter when the engineered cell is not combined with the metabolite (or bacterial product) or inviable cell derived from the second bacterial strain.

[0286] In some embodiments, a pharmaceutical composition comprising a bacterial population comprising a first bacterial strain and different second bacterial strain can be combined within a medium for at most 30 hours, 25 hours, 20 hours, 15 hours, 10 hours, 8 hours or 5 hours, can exhibit a growth of at least 101%, 105%, 110%, 115%, or 119% by colony-forming unit (CFU) as compared to a growth of the first bacterial strain when combined in a medium for at most about 15 hours not comprising the second bacterial strain or the supernatant thereof, which can include secreted metabolites (or bacterial products), fermentation products, and/or can be cell-free. In some embodiments, a pharmaceutical composition comprising a bacterial population comprising a first bacterial strain and different second bacterial strain can be combined within a medium for at most 30 hours, 25 hours, 20 hours, 15 hours, 10 hours, 8 hours or 5 hours, can exhibit a growth of at least 120%, 130%, 140%, or 149% by colony-forming unit (CFU) as compared to a growth of the first bacterial strain when combined in a medium for at most about hours not comprising the second bacterial strain or the supernatant thereof, which can include secreted metabolites (or bacterial products), fermentation products, and/or can be cell-free. In some embodiments, the media in which the first bacterial strain may be grown can comprise a secreted metabolite (or bacterial product) from the second bacterial strain or its supernatant. In some embodiments, the supernatant can be cell-free.

[0287] In some embodiments, a pharmaceutical composition comprising a bacterial population comprising a first bacterial strain and different second bacterial strain can be combined within a medium for at most 30 hours, 25 hours, 20 hours, 15 hours, 10 hours, 8 hours or 5 hours, can exhibit a growth of at least 150%, 160%, 170%, 180%, 190%, or 199% by colony-forming unit (CFU) as compared to a growth of the first bacterial strain when combined in a medium for at most about 15 hours not comprising the second bacterial strain or the supernatant thereof, which can include secreted metabolites (or bacterial products), fermentation products, and/or can be cell-free. In some embodiments, a pharmaceutical composition comprising a bacterial population comprising a first bacterial strain and different second bacterial strain can be combined within a medium for at most 30 hours, 25 hours, 20 hours, 15 hours, 10 hours, 8 hours or 5 hours, can exhibit a growth of at least 200%, 210%, 220%, 230%, 240%, 250%, or greater than 250% by colony-forming unit (CFU) as compared to a growth of the first bacterial strain when combined in a medium for at most about 15 hours not comprising the second bacterial strain or the supernatant thereof, which can include secreted metabolites (or bacterial products), fermentation products, and/or can be cell-free.

[0288] In some embodiments wherein a pharmaceutical composition comprising a bacterial population comprising a first bacterial strain and a different second bacterial strain, the first bacterial strain can be configured to utilize a metabolite (or bacterial product) derived from the bacterial strain as an energy source. In some embodiments, the metabolite (or bacterial product) is not a butyrate.

[0289] In some embodiments wherein a pharmaceutical composition comprising a bacterial population comprising at least one strain of Lactobacillus, sp. and/or at least one or more strains of Bifidobacterium sp., and/or at least one strain of Akkermansia sp., and/or at least one or more strains of Blautia sp. and/or at least one or more strains of Clostridium sp., and/or at least one or more strains of Coprococcus sp., and/or at least one or more strains of Dorea sp., and/or at least one or more strains of Faecalibacterium sp., and/or at least one or more strains of Roseburia sp., and/or at least one or more strains of Ruminococcus sp., and/or at least one or more strains of Anaerbutyricum sp., and/or at least one or more strains of Anaerostipes sp. and/or at least one or more strains of Anaerotignum sp., and/or at least one or more strains of Bacillus sp., and/or at least one or more strains of Bacteroides sp., and/or at least one or more strains of strain of Clostridium sp., and/or at least one or more strains of Collinsella sp., and/or at least one or more strains of Enterococcus sp., and/or at least one or more strains of Erysipelatoclostridium sp., and/or at least one or more strains of Escherichia sp., and/or at least one or more strains of Eubacterium sp. and/or at least one or more strains of Faecalicatena sp., and/or at least one or more strains of Holdemanella sp., and/or at least one or more strains of Lachnospira sp., and/or at least one or more strains of Longibaculum sp. and/or at least one or more strains of Paraprevotella sp., and/or at least one or more strains of Parabacteroides sp., and/or at least one or more strains of Pediococcus sp., and/or at least one or more strains of Veillonella sp., or a combination thereof, when combined within a medium comprising sialic acid, does not exhibit a growth of at least 101%, 105%, 110%, 115%, 120%, 130%, 140% 150%, 160%, 170%, 180%, 190%, 200%, 250%, 300%, 350%, 400%, 450%, 500%, 550%, 600%, 650%, 700%, 750%, 800%, 850%, 900%, 950%, 999%, 1000%, 1100%, or more than 1100% by weight as compared to the growth of a reference bacterial population when combined in a medium that can be comprised of glucose. In some embodiments, glucose can be a carbon source or the sole carbon source.

### Cultured Medium/Bacterial Products

[0290] In some cases, a bacterial strain or a bacterial population may exhibit a sufficient ability in a disease associated function using a bacterial product generated by the bacterial strain or the bacterial population. In some cases, two bacterial strains may exhibit a collective interaction using a bacterial product generated by at least one of the bacterial strains. In some cases, a bacterial strain or a bacterial population may exhibit a collective effect in a disease associated function using a bacterial product generated by the bacterial strain or the bacterial population.

[0291] The bacterial product may be present in a cultured medium of a bacterial strain. In some cases, the bacterial product may be present in a supernatant of the cultured medium. In some cases, when referring to a sufficient ability or collective effect of a bacterial strain on a disease associated function, the cultured medium of the bacterial strain, the supernatant thereof, or the bacterial product generated by the bacterial strain may have substantially the same or the same property or effect (i.e., the output of the property or effect being measured is within 80%, 85%, 90%, 91%, 92%, 93%, 94%, 95%, 96%, 97%, 98%, 99% or more). Thus, when referring to the sufficient ability or collective effect of the cultured medium of the bacterial strain, the supernatant thereof, or the bacterial product generated by the bacterial strain, the control can comprise the control described herein (such as the media control); or the cultured medium of the control bacterial strain, the supernatant thereof, or the bacterial product generated by the control bacterial strain.

[0292] In some cases, a first bacterial strain may convert a nutrient source into a first substance different from the nutrient source (such as by metabolic activity of the first bacterial strain) that is utilized by the second bacterial strain (different from the first bacterial strain). The second bacterial strain may use the first substance as a nutrient source (and for example, convert the first substance into a second substance different from the first substance and/or nutrient source). The second bacterial strain may not have a sufficient ability to utilize the nutrient source. Such interaction can allow the bacterial population comprising the first/second bacterial strains (or the cultured medium or the supernatant thereof) to exhibit a collective effect on a disease associated function as described herein. In another case, the generation of the second substance may only occur when the first bacterial population utilizes a nutrient source and convert to the first substance, whether the second bacterial strain can (or cannot) utilize the nutrient source. The second substance may facilitate the collective effect of the first/second bacterial strains (or the cultured medium or the supernatant thereof) on the disease associated function.

[0293] A supernatant of the cultured medium may comprise at least a fractionated or at least a partially purified derivative of the cultured medium. In some cases, the supernatant of the cultured medium may not comprise a bacterial cell. In some cases, the cultured medium may not comprise a bacterial cell. In some cases, the cultured medium or the supernatant thereof may comprise a bacterial cell. In some cases, the cultured medium or the supernatant thereof may comprise at most 1, 10, 100, 1000, or 10000 bacterial cells. In some cases, the cultured medium or the supernatant thereof having a sufficient ability a collective effect on a disease associated function may comprise at least 1, 2, 3, 4, 5 or more bacterial products.

[0294] In some cases, the pH of a cultured medium or a supernatant may be adjusted subsequent to culturing a bacterial strain with the cultured medium or a supernatant. For example, the pH may be lowered by at least 0.1, 0.2, 0.3, 0.4, 0.5, 0.6, 0.7, 0.8, 0.9, 1, 1.1, 1.2, 1.3, 1.4, 1.5, 1.6, 1.7, 1.8, 1.9, 2, 2.5, 3, 3.5, 4, 4.5, 5, 5.5, 6, 6.5, 7 or more. The pH may be lowered by at most 0.1, 0.2, 0.3, 0.4, 0.5, 0.6, 0.7, 0.8, 0.9, 1, 1.1, 1.2, 1.3, 1.4, 1.5, 1.6, 1.7, 1.8, 1.9, 2, 2.5, 3, 3.5, 4, 4.5, 5, 5.5, 6, 6.5, or 7. The pH may be increased by at least 0.1, 0.2, 0.3, 0.4, 0.5, 0.6, 0.7, 0.8, 0.9, 1, 1.1, 1.2, 1.3, 1.4, 1.5, 1.6, 1.7, 1.8, 1.9, 2, 2.5, 3, 3.5, 4, 4.5, 5, 5.5, 6, 6.5, 7 or more. The pH may be increased by at most 0.1, 0.2, 0.3, 0.4, 0.5, 0.6, 0.7, 0.8, 0.9, 1, 1.1, 1.2, 1.3, 1.4, 1.5, 1.6, 1.7, 1.8, 1.9, 2, 2.5, 3, 3.5, 4, 4.5, 5, 5.5, 6, 6.5, or 7. In some cases, the conditioned medium or supernatant may comprise a carbon source as described herein. The carbon source may comprise a vaginally-relevant carbohydrate or an infant gastrointestinally relevant carbohydrate. The conditioned medium with a carbon source can be used as a culture medium for culturing a recipient bacterial strain.

[0295] In some embodiments, the bacterial product may comprise a fermentation product of a bacterial strain. In some embodiments, the bacterial product may comprise a metabolite (or bacterial product). In some embodiments, the bacterial product may comprise a secreted metabolite (or bacterial product). In some embodiments, the bacterial product may comprise an organic compound. In some embodiments, the bacterial product may comprise an inorganic compound. In some embodiments, the bacterial product may comprise a peptide or polypeptide. In some embodiments, the bacterial product may comprise an amino acid. In some embodiments, the bacterial product may comprise a carbohydrate. In some embodiments, the bacterial product may comprise a derivative of a vaginally relevant carbohydrate. The bacterial product may comprise a derivative of glycogen, glucose, dextrin (such as maltodextrin), maltose, mucin, sialic acid, or a combination thereof. The bacterial product may comprise a derivative of glycogen. The bacterial product may comprise a derivative of glucose. The bacterial product may comprise a derivative of dextrin or maltodextrin. The bacterial product may comprise a derivative of maltose. The bacterial product may comprise a derivative of mucin. The bacterial product may comprise a derivative of sialic acid. The bacterial product may comprise a derivative of an infant gastrointestinally relevant carbohydrate. The bacterial product may comprise a derivative of HMOs. The bacterial product may have a sufficient ability in utilizing 2′FL. The bacterial product may have a sufficient ability in utilizing LNT. The bacterial product may have a sufficient ability in utilizing LNDFH-I. The bacterial product may have a sufficient ability in utilizing LNFP-I. The bacterial product may have a sufficient ability in utilizing LNFP-II. The bacterial product may have a sufficient ability in utilizing 3-FL. The bacterial product may have a sufficient ability in utilizing 6′-SL. The bacterial product may have a sufficient ability in utilizing DSLNT. The bacterial product may have a sufficient ability in utilizing LNnT. The bacterial product may have a sufficient ability in utilizing DFL. The bacterial product may have a sufficient ability in utilizing FDS-LNH. The bacterial product may have a sufficient ability in utilizing LNFP-III. The bacterial product may have a sufficient ability in utilizing 3′SL. In some embodiments, the bacterial product may comprise a lipid.

[0296] In some embodiments, the bacterial product may comprise lactic acids, hydrogen peroxide, cell wall components (such as lipoteichoic acid/LPS), proteinaceous or peptide products, short chain fatty acids, immunomodulatory lipids, bacteriocins or a combination thereof. In some embodiments, the bacterial product may comprise lactic acids. In some cases, the bacterial product may comprise hydrogen peroxide. In some embodiments, the bacterial product may comprise cell wall components. In some embodiments, the bacterial product may comprise LPS, In some embodiments, the bacterial product may comprise proteinaceous or peptide products. In some embodiments, the bacterial product may comprise short chain fatty acids. In some embodiments, the bacterial product may comprise immunomodulatory lipids. In some embodiments, the bacterial product may comprise bacteriocins.

[0297] In some embodiments, the bacterial product may not comprise a heterologous gene product. In some embodiments, the bacterial product may not comprise a recombinant gene product. In some embodiments, the bacterial product may not comprise a mammalian gene product. In some embodiments, the bacterial product may not comprise a synthetic gene product. In some embodiments, the bacterial product may not comprise a human cluster of differentiation 4 (CD4) peptide or a fragment thereof. In some embodiments, the bacterial product may not comprise a CD4 peptide or fragment thereof.

[0298] In some cases, the conditioned medium or supernatant of a bacterial strain described herein can have the sufficient ability in the disease associated function of the bacterial strain. In some cases, the bacterial product generated by a bacterial strain described herein can have the sufficient ability in the disease associated function of the bacterial strain. Thus, the sufficient ability of the bacterial strain described herein can be extend to the conditioned medium or supernatant of the bacterial strain or the bacterial product generated by the bacterial strain.

### Dosages

[0299] In some instances, a bacterial population may comprise a varying number of colony-forming units (CFU/dose) of each of the bacterial species and/or strain it contains. In some cases, a bacterial population may comprise from about 1×10\hat{ }3 CFU/dose to about 1×10\hat{ }12 CFU/dose of a bacterial species or strain. In some cases, a bacterial population may comprise from about 1×10\hat{ }3 CFU/dose to about 1×10\hat{ }11 CFU/dose of a bacterial species or strain. In some cases, a bacterial population may comprise from about 1×10\hat{ }3 CFU/dose to about 1×10\hat{ }10 CFU/dose of a bacterial species or strain. In some cases, a bacterial population may comprise from about 1×10\hat{ }3 CFU/dose to about 1×10\hat{ }9 CFU/dose of a bacterial species or strain. In some cases, a bacterial population may comprise from about 1×10\hat{ }3 CFU/dose to about 1×10\hat{ }8 CFU/dose of a bacterial species or strain. In some cases, a bacterial population may comprise from about 1×10\hat{ }4 CFU/dose to about 1×10\hat{ }12 CFU/dose of a bacterial species or strain. In some cases, a bacterial population may comprise from about 1×10\hat{ }4 CFU/dose to about 1×10\hat{ }11 CFU/dose of a bacterial species or strain. In some cases, a bacterial population may comprise from about 1×10\hat{ }4 CFU/dose to about 1×10\hat{ }10 CFU/dose of a bacterial species or strain. In some cases, a bacterial population may comprise from about 1×10\hat{ }4 CFU/dose to about 1×10\hat{ }9 CFU/dose of a bacterial species or strain. In some cases, a bacterial population may comprise from about 1×10\hat{ }4 CFU/dose to about 1×10\hat{ }8 CFU/dose of a bacterial species or strain. In some cases, a bacterial population may comprise from about 1×10\hat{ }5 CFU/dose to about 1×10\hat{ }12 CFU/dose of a bacterial species or strain. In some cases, a bacterial population may comprise from about 1×10\hat{ }5 CFU/dose to about 1×10\hat{ }11 CFU/dose of a bacterial species or strain. In some cases, a bacterial population may comprise from about 1×10\hat{ }5 CFU/dose to about 1×10\hat{ }10 CFU/dose of a bacterial species or strain. In some cases, a bacterial population may comprise from about 1×10\hat{ }5 CFU/dose to about 1×10\hat{ }9 CFU/dose of a bacterial species or strain. In some cases, a bacterial population may comprise from about 1×10\hat{ }5 CFU/dose to about 1×10\hat{ }8 CFU/dose of a bacterial species or strain. In some cases, a bacterial population may comprise from about 1×10\hat{ }6 CFU/dose to about 1×10\hat{ }12 CFU/dose of a bacterial species or strain. In some cases, a bacterial population may comprise from about 1×10\hat{ }6 CFU/dose to about 1×10\hat{ }11 CFU/dose of a bacterial species or strain. In some cases, a bacterial population may comprise from about 1×10\hat{ }6 CFU/dose to about 1×10\hat{ }10 CFU/dose of a bacterial species or strain. In some cases, a bacterial population may comprise from about 1×10\hat{ }6 CFU/dose to about 1×10\hat{ }9 CFU/dose of a bacterial species or strain. In some cases, a bacterial population may comprise from about 1×10\hat{ }6 CFU/dose to about 1×10\hat{ }8 CFU/dose of a bacterial species or strain. In some cases, a bacterial population may comprise from about 1×10\hat{ }7 CFU/dose to about 1×10\hat{ }12 CFU/dose of a bacterial species or strain. In some cases, a bacterial population may comprise from about 1×10\hat{ }7 CFU/dose to about 1×10\hat{ }11 CFU/dose of a bacterial species or strain. In some cases, a bacterial population may comprise from about 1×10\hat{ }7 CFU/dose to about 1×10\hat{ }10 CFU/dose of a bacterial species or strain. In some cases, a bacterial population may comprise from about 1×10\hat{ }7 CFU/dose to about 1×10\hat{ }9 CFU/dose of a bacterial species or strain. In some cases, a bacterial population may comprise from about 1×10\hat{ }7 CFU/dose to about 1×10\hat{ }8 CFU/dose of a bacterial species or strain. In some cases, a bacterial population may comprise from about 1×10\hat{ }8 CFU/dose to about 1×10\hat{ }12 CFU/dose of a bacterial species or strain. In some cases, a bacterial population may comprise from about 1×10\hat{ }8 CFU/dose to about 1×10\hat{ }11 CFU/dose of a bacterial species or strain. In some cases, a bacterial population may comprise from about 1×10\hat{ }8 CFU/dose to about 1×10\hat{ }10 CFU/dose of a bacterial species or strain. In some cases, a bacterial population may comprise from about 1×10\hat{ }8 CFU/dose to about 1×10\hat{ }9 CFU/dose of a bacterial species or strain. In some cases, a bacterial population may comprise from about 1×10\hat{ }9 CFU/dose to about 1×10\hat{ }12 CFU/dose of a bacterial species or strain. In some cases, a bacterial population may comprise from about 1×10\hat{ }9 CFU/dose to about 1×10\hat{ }11 CFU/dose of a bacterial species or strain. In some cases, a bacterial population may comprise from about 1×10\hat{ }9 CFU/dose to about 1×10\hat{ }10 CFU/dose of a bacterial species or strain. In some cases, such bacterial population may also comprise from about 1×10\hat{ }7 CFU/dose to about 1×10\hat{ }10 CFU/dose of a bacterial species or strain. In some instances, a bacterial population may comprise at least about 1×10\hat{ }3 CFU/dose, 5×10\hat{ }3 CFU/dose, 1×10\hat{ }4 CFU/dose, 5×10\hat{ }4 CFU/dose, 1×10\hat{ }5 CFU/dose, 5×10\hat{ }5 CFU/dose, 1×10\hat{ }6 CFU/dose, 5×10\hat{ }6 CFU/dose, 1×10\hat{ }7 CFU/dose, 5×10\hat{ }7 CFU/dose, 1×10\hat{ }8 CFU/dose, 5×10\hat{ }8 CFU/dose, 1×10\hat{ }9 CFU/dose, 5×10\hat{ }9 CFU/dose, 1×10\hat{ }10 CFU/dose, 5×10\hat{ }10 CFU/dose, 1×10\hat{ }11 CFU/dose, 5×10\hat{ }11 CFU/dose, or 1×10\hat{ }12 CFU/dose, but no more than about 5×10\hat{ }12 CFU/dose of a bacterial species or strain. The bacterial populations may also comprise from about 1×10\hat{ }6 to about 1×10\hat{ }11 CFU/dose per bacterial species or strain. In some cases, the bacterial populations may comprise from about 1×10\hat{ }3 to about 1×10\hat{ }12 CFU/dose per bacterial species or strain. In some instances, the bacterial populations may comprise from about 1×10\hat{ }8 to about 5×10\hat{ }10 CFU/dose per bacterial species or strain. In some instances, the bacterial populations may comprise from about 1×10\hat{ }7 to about 5×10\hat{ }10 CFU/dose per bacterial species or strain. In various cases, a bacterial population may comprise about 5×10\hat{ }8 CFU/dose per bacterial species or strain.

[0300] In some instances, a bacterial population may comprise a varying number of colony-forming units (CFU/dose) of bacterial cells. In some cases, a bacterial population may comprise from about 1×10\hat{ }3 CFU/dose to about 1×10\hat{ }12 CFU/dose of bacterial cells. In some cases, a bacterial population may comprise from about 1×10\hat{ }3 CFU/dose to about 1×10\hat{ }11 CFU/dose of bacterial cells. In some cases, a bacterial population may comprise from about 1×10\hat{ }3 CFU/dose to about 1×10\hat{ }10 CFU/dose of bacterial cells. In some cases, a bacterial population may comprise from about 1×10\hat{ }3 CFU/dose to about 1×10\hat{ }9 CFU/dose of bacterial cells. In some cases, a bacterial population may comprise from about 1×10\hat{ }3 CFU/dose to about 1×10\hat{ }8 CFU/dose of bacterial cells. In some cases, a bacterial population may comprise from about 1×10\hat{ }4 CFU/dose to about 1×10\hat{ }12 CFU/dose of bacterial cells. In some cases, a bacterial population may comprise from about 1×10\hat{ }4 CFU/dose to about 1×10\hat{ }11 CFU/dose of bacterial cells. In some cases, a bacterial population may comprise from about 1×10\hat{ }4 CFU/dose to about 1×10\hat{ }10 CFU/dose of bacterial cells. In some cases, a bacterial population may comprise from about 1×10\hat{ }4 CFU/dose to about 1×10\hat{ }9 CFU/dose of bacterial cells. In some cases, a bacterial population may comprise from about 1×10\hat{ }4 CFU/dose to about 1×10\hat{ }8 CFU/dose of bacterial cells. In some cases, a bacterial population may comprise from about 1×10\hat{ }5 CFU/dose to about 1×10\hat{ }12 CFU/dose of bacterial cells. In some cases, a bacterial population may comprise from about 1×10\hat{ }5 CFU/dose to about 1×10\hat{ }11 CFU/dose of bacterial cells. In some cases, a bacterial population may comprise from about 1×10\hat{ }5 CFU/dose to about 1×10\hat{ }10 CFU/dose of bacterial cells. In some cases, a bacterial population may comprise from about 1×10\hat{ }5 CFU/dose to about 1×10\hat{ }9 CFU/dose of bacterial cells. In some cases, a bacterial population may comprise from about 1×10\hat{ }5 CFU/dose to about 1×10\hat{ }8 CFU/dose of bacterial cells. In some cases, a bacterial population may comprise from about 1×10\hat{ }6 CFU/dose to about 1×10\hat{ }12 CFU/dose of bacterial cells. In some cases, a bacterial population may comprise from about 1×10\hat{ }6 CFU/dose to about 1×10\hat{ }11 CFU/dose of bacterial cells. In some cases, a bacterial population may comprise from about 1×10\hat{ }6 CFU/dose to about 1×10\hat{ }10 CFU/dose of bacterial cells. In some cases, a bacterial population may comprise from about 1×10\hat{ }6 CFU/dose to about 1×10\hat{ }9 CFU/dose of bacterial cells. In some cases, a bacterial population may comprise from about 1×10\hat{ }6 CFU/dose to about 1×10\hat{ }8 CFU/dose of bacterial cells. In some cases, a bacterial population may comprise from about 1×10\hat{ }7 CFU/dose to about 1×10\hat{ }12 CFU/dose of bacterial cells. In some cases, a bacterial population may comprise from about 1×10\hat{ }7 CFU/dose to about 1×10\hat{ }11 CFU/dose of bacterial cells. In some cases, a bacterial population may comprise from about 1×10\hat{ }7 CFU/dose to about 1×10\hat{ }10 CFU/dose of bacterial cells. In some cases, a bacterial population may comprise from about 1×10\hat{ }7 CFU/dose to about 1×10\hat{ }9 CFU/dose of bacterial cells. In some cases, a bacterial population may comprise from about 1×10\hat{ }7 CFU/dose to about 1×10\hat{ }8 CFU/dose of bacterial cells. In some cases, a bacterial population may comprise from about 1×10\hat{ }8 CFU/dose to about 1×10\hat{ }12 CFU/dose of bacterial cells. In some cases, a bacterial population may comprise from about 1×10\hat{ }8 CFU/dose to about 1×10\hat{ }11 CFU/dose of bacterial cells. In some cases, a bacterial population may comprise from about 1×10\hat{ }8 CFU/dose to about 1×10\hat{ }10 CFU/dose of bacterial cells. In some cases, a bacterial population may comprise from about 1×10\hat{ }8 CFU/dose to about 1×10\hat{ }9 CFU/dose of bacterial cells. In some cases, a bacterial population may comprise from about 1×10\hat{ }9 CFU/dose to about 1×10\hat{ }12 CFU/dose of bacterial cells. In some cases, a bacterial population may comprise from about 1×10\hat{ }9 CFU/dose to about 1×10\hat{ }11 CFU/dose of bacterial cells. In some cases, a bacterial population may comprise from about 1×10\hat{ }9 CFU/dose to about 1×10\hat{ }10 CFU/dose of bacterial cells. In some cases, such bacterial population may also comprise from about 1×10\hat{ }7 CFU/dose to about 1×10\hat{ }10 CFU/dose of bacterial cells. In some instances, a bacterial population may comprise at least about 1×10\hat{ }3 CFU/dose, 5×10\hat{ }3 CFU/dose, 1×10\hat{ }4 CFU/dose, 5×10\hat{ }4 CFU/dose, 1×10\hat{ }5 CFU/dose, 5×10\hat{ }5 CFU/dose, 1×10\hat{ }6 CFU/dose, 5×10\hat{ }6 CFU/dose, 1×10\hat{ }7 CFU/dose, 5×10\hat{ }7 CFU/dose, 1×10\hat{ }8 CFU/dose, 5×10\hat{ }8 CFU/dose, 1×10\hat{ }9 CFU/dose, 5×10\hat{ }9 CFU/dose, 1×10\hat{ }10 CFU/dose, 5×10\hat{ }10 CFU/dose, 1×10\hat{ }11 CFU/dose, 5×10\hat{ }11 CFU/dose, or 1×10\hat{ }12 CFU/dose, but no more than about 5×10\hat{ }12 CFU/dose of bacterial cells.

[0301] In some cases, at least one strain of Bifidobacterium sp. of a pharmaceutical composition may comprise from about 1×10\hat{ }6 CFU/dose to about 5×10\hat{ }9 CFU/dose. In some cases, at least one strain of Bifidobacterium sp. of a pharmaceutical composition may comprise from about 1×10\hat{ }6 CFU/dose to about 4×10\hat{ }9 CFU/dose. In some cases, at least one strain of Bifidobacterium sp. of a pharmaceutical composition may comprise from about 1×10\hat{ }6 CFU/dose to about 3×10\hat{ }9 CFU/dose. In some cases, at least one strain of Bifidobacterium sp. of a pharmaceutical composition may comprise from about 1×10\hat{ }6 CFU/dose to about 2×10\hat{ }9 CFU/dose. In some cases, at least one strain of Bifidobacterium sp. of a pharmaceutical composition may comprise from about 1×10\hat{ }6 CFU/dose to about 1×10\hat{ }9 CFU/dose. In some cases, at least one strain of Bifidobacterium sp. of a pharmaceutical composition may comprise from about 1×10\hat{ }6 CFU/dose to about 9×10\hat{ }8 CFU/dose. In some cases, at least one strain of Bifidobacterium sp. of a pharmaceutical composition may comprise from about 1×10\hat{ }6 CFU/dose to about 8×10\hat{ }8 CFU/dose. In some cases, at least one strain of Bifidobacterium sp. of a pharmaceutical composition may comprise from about 1×10\hat{ }6 CFU/dose to about 7×10\hat{ }8 CFU/dose. In some cases, at least one strain of Bifidobacterium sp. of a pharmaceutical composition may comprise from about 1×10\hat{ }6 CFU/dose to about 6×10\hat{ }8 CFU/dose. In some cases, at least one strain of Bifidobacterium sp. of a pharmaceutical composition may comprise from about 1×10\hat{ }6 CFU/dose to about 5×10\hat{ }8 CFU/dose. In some cases, at least one strain of Bifidobacterium sp. of a pharmaceutical composition may comprise from about 1×10\hat{ }6 CFU/dose to about 4×10\hat{ }8 CFU/dose. In some cases, at least one strain of Bifidobacterium sp. of a pharmaceutical composition may comprise from about 1×10\hat{ }6 CFU/dose to about 3×10\hat{ }8 CFU/dose. In some cases, at least one strain of Bifidobacterium sp. of a pharmaceutical composition may comprise from about 1×10\hat{ }6 CFU/dose to about 2×10\hat{ }8 CFU/dose. In some cases, at least one strain of Bifidobacterium sp. of a pharmaceutical composition may comprise from about 1×10\hat{ }6 CFU/dose to about 1×10\hat{ }8 CFU/dose. In some cases, at least one strain of Bifidobacterium sp. of a pharmaceutical composition may comprise from about 1×10\hat{ }6 CFU/dose to about 9×10\hat{ }7 CFU/dose. In some cases, at least one strain of Bifidobacterium sp. of a pharmaceutical composition may comprise from about 1×10\hat{ }6 CFU/dose to about 8×10\hat{ }7 CFU/dose. In some cases, at least one strain of Bifidobacterium sp. of a pharmaceutical composition may comprise from about 1×10\hat{ }6 CFU/dose to about 7×10\hat{ }7 CFU/dose. In some cases, at least one strain of Bifidobacterium sp. of a pharmaceutical composition may comprise from about 1×10\hat{ }6 CFU/dose to about 6×10\hat{ }7 CFU/dose. In some cases, at least one strain of Bifidobacterium sp. of a pharmaceutical composition may comprise from about 1×10\hat{ }6 CFU/dose to about 5×10\hat{ }7 CFU/dose. In some cases, at least one strain of Bifidobacterium sp. of a pharmaceutical composition may comprise from about 1×10\hat{ }6 CFU/dose to about 4×10\hat{ }7 CFU/dose. In some cases, at least one strain of Bifidobacterium sp. of a pharmaceutical composition may comprise from about 1×10\hat{ }6 CFU/dose to about 3×10\hat{ }7 CFU/dose. In some cases, at least one strain of Bifidobacterium sp. of a pharmaceutical composition may comprise from about 1×10\hat{ }6 CFU/dose to about 2×10\hat{ }7 CFU/dose. In some cases, at least one strain of Bifidobacterium sp. of a pharmaceutical composition may comprise from about 1×10\hat{ }6 CFU/dose to about 1×10\hat{ }7 CFU/dose. In some cases, at least one strain of Bifidobacterium sp. may comprise about 5×10\hat{ }9 CFU/dose. In some cases, at least one strain of Bifidobacterium sp. may comprise about 4×10\hat{ }9 CFU/dose. In some cases, at least one strain of Bifidobacterium sp. may comprise about 3×10\hat{ }9 CFU/dose. In some cases, at least one strain of Bifidobacterium sp. may comprise about 2×10\hat{ }9 CFU/dose. In some cases, at least one strain of Bifidobacterium sp. may comprise about 1×10\hat{ }9 CFU/dose. In some cases, at least one strain of Bifidobacterium sp. may comprise about 9×10\hat{ }8 CFU/dose. In some cases, at least one strain of Bifidobacterium sp. may comprise about 8×10\hat{ }8 CFU/dose. In some cases, at least one strain of Bifidobacterium sp. may comprise about 7×10\hat{ }8 CFU/dose. In some cases, at least one strain of Bifidobacterium sp. may comprise about 6×10\hat{ }8 CFU/dose. In some cases, at least one strain of Bifidobacterium sp. may comprise about 5×10\hat{ }8 CFU/dose. In some cases, at least one strain of Bifidobacterium sp. may comprise about 4×10\hat{ }8 CFU/dose. In some cases, at least one strain of Bifidobacterium sp. may comprise about 3×10\hat{ }8 CFU/dose. In some cases, at least one strain of Bifidobacterium sp. may comprise about 2×10\hat{ }8 CFU/dose. In some cases, at least one strain of Bifidobacterium sp. may comprise about 1×10\hat{ }8 CFU/dose. In some cases, at least one strain of Bifidobacterium sp. may comprise about 9×10\hat{ }7 CFU/dose. In some cases, at least one strain of Bifidobacterium sp. may comprise about 8×10\hat{ }7 CFU/dose. In some cases, at least one strain of Bifidobacterium sp. may comprise about 7×10\hat{ }7 CFU/dose. In some cases, at least one strain of Bifidobacterium sp. may comprise about 6×10\hat{ }7 CFU/dose. In some cases, at least one strain of Bifidobacterium sp. may comprise about 5×10\hat{ }7 CFU/dose. In some cases, at least one strain of Bifidobacterium sp. may comprise about 4×10\hat{ }7 CFU/dose. In some cases, at least one strain of Bifidobacterium sp. may comprise about 3×10\hat{ }7 CFU/dose. In some cases, at least one strain of Bifidobacterium sp. may comprise about 2×10\hat{ }7 CFU/dose. In some cases, at least one strain of Bifidobacterium sp. may comprise about 1×10\hat{ }7 CFU/dose.

[0302] In some cases, at least one strain of Vertebrate-Associated Lactobacillaceae of a pharmaceutical composition may comprise from about 1×10\hat{ }7 CFU/dose to about 5×10\hat{ }10 CFU/dose. In some cases, at least one strain of Vertebrate-Associated Lactobacillaceae of a pharmaceutical composition may comprise from about 1×10\hat{ }7 CFU/dose to about 4×10\hat{ }10 CFU/dose. In some cases, at least one strain of Vertebrate-Associated Lactobacillaceae of a pharmaceutical composition may comprise from about 1×10\hat{ }7 CFU/dose to about 3×10\hat{ }10 CFU/dose. In some cases, at least one strain of Vertebrate-Associated Lactobacillaceae of a pharmaceutical composition may comprise from about 1×10\hat{ }7 CFU/dose to about 2×10\hat{ }10 CFU/dose. In some cases, at least one strain of Vertebrate-Associated Lactobacillaceae of a pharmaceutical composition may comprise from about 1×10\hat{ }7 CFU/dose to about 1×10\hat{ }10 CFU/dose. In some cases, at least one strain of Vertebrate-Associated Lactobacillaceae of a pharmaceutical composition may comprise from about 1×10\hat{ }7 CFU/dose to about 9×10\hat{ }9 CFU/dose. In some cases, at least one strain of Vertebrate-Associated Lactobacillaceae of a pharmaceutical composition may comprise from about 1×10\hat{ }7 CFU/dose to about 8×10\hat{ }9 CFU/dose. In some cases, at least one strain of Vertebrate-Associated Lactobacillaceae of a pharmaceutical composition may comprise from about 1×10\hat{ }7 CFU/dose to about 7×10\hat{ }9 CFU/dose. In some cases, at least one strain of Vertebrate-Associated Lactobacillaceae of a pharmaceutical composition may comprise from about 1×10\hat{ }7 CFU/dose to about 6×10\hat{ }9 CFU/dose. In some cases, at least one strain of Vertebrate-Associated Lactobacillaceae of a pharmaceutical composition may comprise from about 1×10\hat{ }7 CFU/dose to about 5×10\hat{ }9 CFU/dose. In some cases, at least one strain of Vertebrate-Associated Lactobacillaceae of a pharmaceutical composition may comprise from about 1×10\hat{ }7 CFU/dose to about 4×10\hat{ }9 CFU/dose. In some cases, at least one strain of Vertebrate-Associated Lactobacillaceae of a pharmaceutical composition may comprise from about 1×10\hat{ }7 CFU/dose to about 3×10\hat{ }9 CFU/dose. In some cases, at least one strain of Vertebrate-Associated Lactobacillaceae of a pharmaceutical composition may comprise from about 1×10\hat{ }7 CFU/dose to about 2×10\hat{ }9 CFU/dose. In some cases, at least one strain of Vertebrate-Associated Lactobacillaceae of a pharmaceutical composition may comprise from about 1×10\hat{ }7 CFU/dose to about 1×10\hat{ }9 CFU/dose. In some cases, at least one strain of Vertebrate-Associated Lactobacillaceae of a pharmaceutical composition may comprise from about 1×10\hat{ }7 CFU/dose to about 9×10\hat{ }8 CFU/dose. In some cases, at least one strain of Vertebrate-Associated Lactobacillaceae of a pharmaceutical composition may comprise from about 1×10\hat{ }7 CFU/dose to about 8×10\hat{ }8 CFU/dose. In some cases, at least one strain of Vertebrate-Associated Lactobacillaceae of a pharmaceutical composition may comprise from about 1×10\hat{ }7 CFU/dose to about 7×10\hat{ }8 CFU/dose. In some cases, at least one strain of Vertebrate-Associated Lactobacillaceae of a pharmaceutical composition may comprise from about 1×10\hat{ }7 CFU/dose to about 6×10\hat{ }8 CFU/dose. In some cases, at least one strain of Vertebrate-Associated Lactobacillaceae of a pharmaceutical composition may comprise from about 1×10\hat{ }7 CFU/dose to about 5×10\hat{ }8 CFU/dose. In some cases, at least one strain of Vertebrate-Associated Lactobacillaceae of a pharmaceutical composition may comprise from about 1×10\hat{ }7 CFU/dose to about 4×10\hat{ }8 CFU/dose. In some cases, at least one strain of Vertebrate-Associated Lactobacillaceae of a pharmaceutical composition may comprise from about 1×10\hat{ }7 CFU/dose to about 3×10\hat{ }8 CFU/dose. In some cases, at least one strain of Vertebrate-Associated Lactobacillaceae of a pharmaceutical composition may comprise from about 1×10\hat{ }7 CFU/dose to about 2×10\hat{ }8 CFU/dose. In some cases, at least one strain of Vertebrate-Associated Lactobacillaceae of a pharmaceutical composition may comprise from about 1×10\hat{ }7 CFU/dose to about 1×10\hat{ }8 CFU/dose. In some cases, at least one strain of Vertebrate-Associated Lactobacillaceae may comprise about 5×10\hat{ }9 CFU/dose. In some cases, at least one strain of Vertebrate-Associated Lactobacillaceae may comprise about 4×10\hat{ }9 CFU/dose. In some cases, at least one strain of Vertebrate-Associated Lactobacillaceae may comprise about 3×10\hat{ }9 CFU/dose. In some cases, at least one strain of Vertebrate-Associated Lactobacillaceae may comprise about 2×10\hat{ }9 CFU/dose. In some cases, at least one strain of Vertebrate-Associated Lactobacillaceae may comprise about 1×10\hat{ }9 CFU/dose. In some cases, at least one strain of Vertebrate-Associated Lactobacillaceae may comprise about 9×10\hat{ }8 CFU/dose. In some cases, at least one strain of Vertebrate-Associated Lactobacillaceae may comprise about 8×10\hat{ }8 CFU/dose. In some cases, at least one strain of Vertebrate-Associated Lactobacillaceae may comprise about 7×10\hat{ }8 CFU/dose. In some cases, at least one strain of Vertebrate-Associated Lactobacillaceae may comprise about 6×10\hat{ }8 CFU/dose. In some cases, at least one strain of Vertebrate-Associated Lactobacillaceae may comprise about 5×10\hat{ }8 CFU/dose. In some cases, at least one strain of Vertebrate-Associated Lactobacillaceae may comprise about 4×10\hat{ }8 CFU/dose. In some cases, at least one strain of Vertebrate-Associated Lactobacillaceae may comprise about 3×10\hat{ }8 CFU/dose. In some cases, at least one strain of Vertebrate-Associated Lactobacillaceae may comprise about 2×10\hat{ }8 CFU/dose. In some cases, at least one strain of Vertebrate-Associated Lactobacillaceae may comprise about 1×10\hat{ }8 CFU/dose. In some cases, at least one strain of Vertebrate-Associated Lactobacillaceae may comprise about 9×10\hat{ }7 CFU/dose. In some cases, at least one strain of Vertebrate-Associated Lactobacillaceae may comprise about 8×10\hat{ }7 CFU/dose. In some cases, at least one strain of Vertebrate-Associated Lactobacillaceae may comprise about 7×10\hat{ }7 CFU/dose. In some cases, at least one strain of Vertebrate-Associated Lactobacillaceae may comprise about 6×10\hat{ }7 CFU/dose. In some cases, at least one strain of Vertebrate-Associated Lactobacillaceae may comprise about 5×10\hat{ }7 CFU/dose. In some cases, at least one strain of Vertebrate-Associated Lactobacillaceae may comprise about 4×10\hat{ }7 CFU/dose. In some cases, at least one strain of Vertebrate-Associated Lactobacillaceae may comprise about 3×10\hat{ }7 CFU/dose. In some cases, at least one strain of Vertebrate-Associated Lactobacillaceae may comprise about 2×10\hat{ }7 CFU/dose. In some cases, at least one strain of Vertebrate-Associated Lactobacillaceae may comprise about 1×10\hat{ }7 CFU/dose.

[0303] In some cases, identification of bacterial strains or isolates may be performed by sequencing of the full-length 16S rRNA gene. Such a method may use one or more amplification primer followed by nucleic acid sequencing. Full-length 16S rRNA gene sequence reads can be aligned in the Ribosomal Database Project (RDP), manually curated using nucleic acid analysis and sequencing programs (e.g., ARB, mother, etc.) to classify reads to operational taxonomic units (OTUs). The full-length 16S rRNA gene sequence of each species-level OTU can then be compared to the RDP reference database to assign taxonomic designations to the genus and/or strain level followed by a BLASTn search to either a characterized or candidate novel species.

[0304] The bacterial population may comprise a purified bacterial strain. The term “purified” or “substantially purified” as used herein when referring to a bacterial strain or a mixture of more than one bacterial strain, refers to the bacterial strain or bacterial strains that are substantially enriched in a sample. A purified or substantially purified bacterial strain(s) in sample may comprise at least about 50%, 60%, 70%, 80%, 85%, 90%, 95%, 99% or greater of the bacterial strain(s) in the sample. A purified or substantially purified bacterial strain(s) in sample may also comprise less than about 40%, 30%, 20%, 15%, 14%, 13%, 12%, 11%, 10%, 9%, 8%, 7%, 6%, 5%, 4%, 3%, 2%, 1% or less of the strains other than the bacterial strain(s) present in the sample. Such strain may comprise a bacterial strain. Such strain may also comprise any non-bacterial strains such as strains from other organisms.

[0305] Within a bacterial population comprising a first and second bacterial strains, the first bacterial strain is at least about 1%, at least about 2%, at least about 3%, at least about 4%, at least about 5%, at least about 6%, at least about 7%, at least about 8%, at least about 9%, at least about 10%, at least about 20%, at least about 30%, at least about 40%, at least about 50%, at least about 60%, at least about 70%, at least about 80%, at least about 90%, at least about 100%, at least about 150%, at least about 2-fold, at least about 3-fold, at least about 4-fold, at least about 5-fold, at least about 6-fold, at least about 7-fold, at least about 8-fold, at least about 9-fold, at least about 10-fold, at least about 100-fold, at least about 1000-fold, at least about 10000-fold, at least about 100000-fold, or at least about 1000000-fold higher than an amount of the second bacterial strain. Within a bacterial population comprising a first and second bacterial strains, the first bacterial strain is at most about 1%, at most about 2%, at most about 3%, at most about 4%, at most about 5%, at most about 6%, at most about 7%, at most about 8%, at most about 9%, at most about 10%, at most about 20%, at most about 30%, at most about 40%, at most about 50%, at most about 60%, at most about 70%, at most about 80%, at most about 90%, at most about 100%, at most about 150%, at most about 2-fold, at most about 3-fold, at most about 4-fold, at most about 5-fold, at most about 6-fold, at most about 7-fold, at most about 8-fold, at most about 9-fold, at most about 10-fold, at most about 100-fold, at most about 1000-fold, at most about 10000-fold, at most about 100000-fold, or at most about 1000000-fold higher than an amount of the second bacterial strain. Within a bacterial population comprising a first and second bacterial strains, the first bacterial strain is at least about 1%, at least about 2%, at least about 3%, at least about 4% at least about 5%, at least about 6%, at least about 7%, at least about 8%, at least about 9%, at least about 10%, at least about 20%, at least about 30%, at least about 40%, at least about 50%, at least about 60%, at least about 70%, at least about 80%, at least about 90%, at least about 100%, at least about 150%, at least about 2-fold, at least about 3-fold, at least about 4-fold, at least about 5-fold, at least about 6-fold, at least about 7-fold, at least about 8-fold, at least about 9-fold, at least about 10-fold, at least about 100-fold, at least about 1000-fold, at least about 10000-fold, at least about 100000-fold, or at least about 1000000-fold lower than an amount of the second bacterial strain. Within a bacterial population comprising a first and second bacterial strains, the first bacterial strain is at most about 1%, at most about 2%, at most about 3%, at most about 4%, at most about 5%, at most about 6%, at most about 7%, at most about 8%, at most about 9%, at most about 10%, at most about 20%, at most about 30%, at most about 40%, at most about 50%, at most about 60%, at most about 70%, at most about 80%, at most about 90%, at most about 100%, at most about 150%, at most about 2-fold, at most about 3-fold, at most about 4-fold, at most about 5-fold, at most about 6-fold, at most about 7-fold, at most about 8-fold, at most about 9-fold, at most about 10-fold, at most about 100-fold, at most about 1000-fold, at most about 10000-fold, at most about 100000-fold, or at most about 1000000-fold lower than an amount of the second bacterial strain.

[0306] In some cases, a bacterial population comprises a viable cell. In some cases, a bacterial population comprises an inviable cell. In some cases, a bacterial population comprises both a viable cell and an inviable cell. In some cases, the bacterial population may comprise at least about 1%, at least about 2%, at least about 3%, at least about 4%, at least about 5%, at least about 6%, at least about 7%, at least about 8%, at least about 9%, at least about 10%, at least about 20%, at least about 30%, at least about 40%, at least about 50%, at least about 60%, at least about 70%, at least about 80%, at least about 90%, at least about 100% viable cells. In some cases, the bacterial population may comprise at most about 1%, at most about 2%, at most about 3%, at most about 4%, at most about 5%, at most about 6%, at most about 7%, at most about 8%, at most about 9%, at most about 10%, at most about 20%, at most about 30%, at most about 40%, at most about 50%, at most about 60%, at most about 70%, at most about 80%, at most about 90%, at most about 100% viable cells. In some cases, the bacterial population may comprise at least about 1%, at least about 2%, at least about 3%, at least about 4%, at least about 5%, at least about 6%, at least about 7%, at least about 8%, at least about 9%, at least about 10%, at least about 20%, at least about 30%, at least about 40%, at least about 50%, at least about 60%, at least about 70%, at least about 80%, at least about 90%, at least about 100% inviable cells. In some cases, the bacterial population may comprise at most about 1%, at most about 2%, at most about 3%, at most about 4%, at most about 5%, at most about 6%, at most about 7%, at most about 8%, at most about 9%, at most about 10%, at most about 20%, at most about 30%, at most about 40%, at most about 50%, at most about 60%, at most about 70%, at most about 80%, at most about 90%, at most about 100% inviable cells.

[0307] In some cases, the composition or the bacterial population may be formulated into a therapeutically-effective amount. The therapeutically-effective amount may comprise any amount of bacteria as described herein, such that at least one of the disease associated functions (such as vaginal disease-associated function and NEC-associated function).

### Excipients

[0308] In some instances, a pharmaceutical composition may comprise a pharmaceutically acceptable excipient. The term “pharmaceutically acceptable excipient” or “excipient”, when referring to a pharmaceutical composition, refers to an excipient that does not produce an adverse, allergic, or other untoward reaction when administered to a subject, preferably a human. A pharmaceutically acceptable excipient may not produce the adverse, allergic, or other untoward reaction when administered to the subject when it is administered alone or in combination with the pharmaceutical composition. A pharmaceutically acceptable excipient may include any solvents, dispersion media, coatings, isotonic and absorption delaying agents and the like. A pharmaceutically acceptable excipient may be added to a pharmaceutical composition to stabilize the pharmaceutical composition. A pharmaceutically acceptable excipient may be added to a pharmaceutical composition to prevent the contamination of the pharmaceutical composition. A pharmaceutically acceptable excipient may be an inert substance added to a pharmaceutical composition to facilitate processing, handling, administration, etc. of the pharmaceutical composition.

[0309] In some cases, a pharmaceutically acceptable excipient may comprise at least a moisture absorbent material, an adjuvant, an antiadherent, a binder, a carrier, a disintegrant, a filler, a flavor, a color, a diluent, a lubricant, a glidant, a preservative, a sorbent, a solvent, a surfactant, a sweetener, a cryoprotectant, or any combination thereof. In some cases, a cryoprotectant may comprise a carbohydrate and an antioxidant. In some embodiments, the carbohydrate may comprise a saccharose, a trehalose, or a combination thereof. In some embodiments, the antioxidant may comprise amino acid. In some cases, a moisture absorbent material may comprise microcrystalline cellulose (MCC), hydroxypropyl methylcellulose, silicon dioxide (SiO₂), polyethylene glycol 8000, lactose, d-trehalose dihydrate, mannitol, calcium phosphate tribasic, calcium sulfate, corn starch, fructose, xylitol, maltitol, anhydrous lactose and dicalcium phosphate (DCP).

### Forms and Administrations

[0310] The composition described herein may be formulated into a pharmaceutical composition. The term “pharmaceutical composition” or “composition”, when referring to a pharmaceutical product, refers to a composition that can elicit or induce at least one physiological effect to a subject when administered by the subject, preferably a human. Such physiological effect may positively contribute to the overall health of a subject. In some cases, such physiological effect may also curb, inhibit, reduce, or decrease a negative physiological phenomenon of the subject.

[0311] In some instances, a pharmaceutical composition may be formulated into a suspension. In some cases, a pharmaceutical composition may be formulated into an oral dosage form or a vaginal dosage form. An oral dosage form of a pharmaceutical composition, in some cases, may comprise a capsule, tablet, emulsion, suspension, syrup, gel, gum, paste, herbal tea, drops, dissolving granules, powders, tablets, lyophilizate, a popsicle, or ice cream. In some cases, an oral dosage form of a pharmaceutical composition may comprise a capsule. In some cases, an oral dosage form of a pharmaceutical composition may comprise a dissolving granule. In some cases, an oral dosage form of a pharmaceutical composition may comprise a drop. In some cases, an oral dosage form of a pharmaceutical composition may comprise an emulsion. In some cases, an oral dosage form of a pharmaceutical composition may comprise a gel. In some cases, an oral dosage form of a pharmaceutical composition may comprise a gum. In some cases, an oral dosage form of a pharmaceutical composition may comprise an herbal tea. In some cases, an oral dosage form of a pharmaceutical composition may comprise an ice cream. In some cases, an oral dosage form of a pharmaceutical composition may comprise a lyophilizate. In some cases, an oral dosage form of a pharmaceutical composition may comprise a paste. In some cases, an oral dosage form of a pharmaceutical composition may comprise a popsicle. In some cases, an oral dosage form of a pharmaceutical composition may comprise a powder. In some cases, an oral dosage form of a pharmaceutical composition may comprise a suspension. In some cases, an oral dosage form of a pharmaceutical composition may comprise a syrup. In some cases, an oral dosage form of a pharmaceutical composition may comprise a tablet. In some cases, an oral dosage form of a pharmaceutical composition may comprise a pill, gel tab, sachet, a lozenge, or any other suitable oral dosage form. In some cases, a pharmaceutical composition in an oral dosage or suspension form may be administered alone. In other cases, a pharmaceutical composition in an oral dosage or suspension form may be mixed with a food product for administration to a subject. Such a food product may comprise baby formula, milk, or any derivatives thereof. In some cases, a pharmaceutical composition may be formulated into a parenteral administration form. A parenteral administration form, in some cases, may comprise various non-oral routes, e.g., in the form of a suppository.

[0312] A pharmaceutical composition for treating or preventing the vaginal or a complication of the vaginal disease may comprise a vaginal dosage form. A pharmaceutical composition for treating or preventing the vaginal or a complication of the vaginal disease may comprise a gel. Such a gel may comprise a hydrogel. A hydrogel can comprise a 3-dimensional polymer cross-linked with water soluble polymers. A hydrogel may comprise a thermo-responsive hydrogel. In some cases, the hydrogel may be mucoadhesive. A hydrogel can comprise a vaginally delivered aqueous hydrogel. A vaginal dosage form may comprise a suspension that is injectable to a vagina. The vaginal dosage form may comprise a suspension that is injectable to a vagina with the aid of a vaginal applicator.

[0313] A pharmaceutical composition for treating or preventing the infant gastrointestinal disease may comprise an oral dosage form. A pharmaceutical composition for treating or preventing the infant gastrointestinal disease may comprise a suspension of a bacterial population. Prior to forming the suspension, the bacterial population may be formulated into a solid or a liquid form as described herein. For example, the bacterial population may be formulated into a powder. In some cases, the pharmaceutical composition for treating or preventing the infant gastrointestinal disease may be mixed with HMOs. The pharmaceutical composition for treating or preventing the infant gastrointestinal disease may be mixed with baby formula. The pharmaceutical composition for treating or preventing the infant gastrointestinal disease may be mixed with human breast milk.

[0314] A composition for treating or preventing the vaginal disease may be mixed with a vaginally relevant carbohydrate as described herein. A pharmaceutical composition for treating or preventing the infant gastrointestinal disease may be mixed with an infant gastrointestinally relevant carbohydrate as described herein. Mixing the compositions with the carbohydrates (such as vaginally relevant carbohydrate/infant gastrointestinally relevant carbohydrate can increase the effect of the composition in the disease associated function, as described here.

[0315] In some instances, a pharmaceutical composition may be formulated into a storage form. The storage form may be encompassed within a container. The container may be a capsule or a tablet. For example, the pharmaceutical composition may be formulated into a powder stored within a capsule or a tablet. The pharmaceutical composition may be formulated into a suspension stored within a capsule or a tablet or a container capable of storing liquid.

[0316] In some instances, a pharmaceutical composition may be formulated into an enteral dosage form. An enteral dosage form, in some instances, may compromise a rectal dosage form, intragastric dosage form, or an oral dosage form. A rectal dosage form, in some instances, may comprise a suppository, gel, or enema suspension or solution. In some cases, an intragastric dosage form may comprise a dosage form that is configured to pass through a feeding tube. In some cases, an intragastric dosage form may comprise a gastroenteral solution, a gastroenteral suspension, or other gastroenteral liquid. In some cases, a pharmaceutical composition may be formulated into an injectable dosage form. A parenteral dosage form, in some instances, may comprise an injectable dosage form, an infusible dosage form, an emulsified injectable dosage form, or an emulsified infusible dosage form or a combination thereof. An injectable dosage pharmaceutical composition, in some instances, may comprise a liquid preparation. In some cases, an injectable dosage pharmaceutical composition may comprise a dry solid that, upon the addition of suitable vehicles, yield injectable solutions. In some cases, an injectable dosage pharmaceutical composition may comprise a liquid suspension of solids suspended in a suitable liquid medium. In some cases, an injectable dosage pharmaceutical composition may comprise an intramuscular or subcutaneous injection. An infusible dosage pharmaceutical composition, in some instances, may comprise a liquid preparation. In some cases, an infusible dosage pharmaceutical composition may comprise a dry solid that, upon the addition of suitable vehicles, yield infusible solutions. In some cases, an infusible dosage pharmaceutical composition may comprise a liquid suspension of solids suspended in a suitable liquid medium. In some cases, an infusible dosage pharmaceutical composition may comprise an intramuscular or subcutaneous infusion. In some instances, a pharmaceutical composition may be formulated into a topical dosage form. In some cases, a topical dosage pharmaceutical composition may comprise creams, foams, gels, lotions, ointments, pastes, powders, or a combination thereof.

[0317] In some cases, a pharmaceutical composition may be encompassed by a primary container. In some instances, a pharmaceutical composition may be encompassed by a capsule. In some cases, a capsule encompassing a pharmaceutical composition may comprise a plant-based capsule. In some cases, a capsule encompassing a pharmaceutical composition may comprise a vegan capsule. In some cases, a plant-based capsule may comprise a plant-derived material. The plant-derived material, in some cases, may comprise a cellulose-based polymer. In some cases, a plant-based capsule may comprise a hypromellose capsule. In some cases, a plant-based capsule may comprise a hydroxypropyl methylcellulose (HPMC) capsule. In some cases, a plant-based capsule may comprise a starch capsule. In some cases, a plant-based capsule may comprise a hydrolyzed plant-based collagen capsule. In some cases, a plant-based capsule may comprise a pullulan capsule. In some cases, a plant-based capsule may comprise a tapioca capsule. In some cases, a plant-based capsule may comprise the combinations of any plant-based materials described thereof. A primary container, in some cases, may comprise any capsules described herein and thereof and derivatives herein and thereof.

[0318] In some cases, a capsule may not be administered to a subject. In some cases, a capsule may not be administered to a subject alongside the pharmaceutical composition. In other cases, a capsule may be administered to a subject.

[0319] In some cases, a pharmaceutical composition may be lyophilized. In some cases, a pharmaceutical composition may be frozen. Such frozen or lyophilized formulations may be administered in a frozen or lyophilized state to a subject. In some instances, such frozen formulation may be a popsicle, an ice cream, or other frozen formulations.

[0320] In some cases, a liquid suspension may be aliquoted into certain volumes to provide a unit dose of such oral dosage form. Such unit dose may have a volume of about 0.25, 0.5, 1, 2, 3, 5, or 10 mL. In some instances, the unit dose of a pharmaceutical composition herein has a volume of about 1 mL. Such pharmaceutical composition may comprise a bacterial population, a cryoprotectant, an antioxidant, an aqueous buffer solution that may from a liquid cell suspension. Such cell suspension may be tested for quality control to ensure it contains a certain number of metabolically active cells per bacterial strain as described herein.

[0321] In some cases, a capsule, tablet or other solid or semisolid pharmaceutical composition may be administered as a vaginal suppository to the subject.

[0322] Provided herein are pharmaceutical compositions that can be designed and manufactured to allow storage and/or transport of the pharmaceutical compositions. In some instances, a pharmaceutical composition herein comprising a bacterial population can be designed such that the viability of the bacterial cells in the pharmaceutical composition is not or only minimally affected by storage and/or transport. In such instances, the viability of at least about 80%, 85%, 90%, 95%, 97%, or 99% of bacterial cells in the pharmaceutical composition is maintained during storage and/or transport.

[0323] In some instances, a pharmaceutical composition herein comprises a cryoprotectant to allow storage at low temperatures at about −70° C. or −80° C. to preserve viability of the bacterial cells. A pharmaceutical composition herein can further comprise an antioxidant that can preserve an anaerobic environment in the storage or transport vial and can protect the bacterial cells from reactive oxygen species. The term “oxygen-free” or “anaerobic” as used herein refers to a state with low oxygen or without oxygen. An oxygen-free or anaerobic environment may have 21%, 20%, 19%, 18%, 17%, 16%, 15%, 14%, 13%, 12%, 11%, 10%, 9%, 8%, 7%, 6%, 5%, 4%, 3%, 2%, 1%, 1×10\hat{ }-1%, 1×10\hat{ }-2%, 1×10\hat{ }-3%, 1×10\hat{ }-4%, 1×10\hat{ }-5%, 1×10\hat{ }-6%, 1×10\hat{ }-7%, 1×10\hat{ }-8%, 1×10\hat{ }-9%, 1×10\hat{ }-10%, 1×10\hat{ }-11%, or less oxygen, by volume, in the atmosphere of the environment.

[0324] In some instances, the antioxidants described herein and thereof may be used with the bacterial populations, the pharmaceutical compositions, the methods for producing pharmaceutical compositions, or the methods for large-scale growth of Vertebrate-Associated Lactobacillaceae or Bifidobacterium sp. described in this disclosure. In some cases, the antioxidants described herein and thereof may be used with the growth media or excipients described in this disclosure. In other cases, the antioxidants described herein and thereof may be used in any embodiments or examples described in this disclosure.

### Methods of Treatment

[0325] In some embodiments, a method of administering the pharmaceutical composition can comprise administering the pharmaceutical composition to a subject who has a disease or disease condition as described herein.

[0326] In some embodiments, a method of administering the pharmaceutical composition can comprise administering the pharmaceutical composition to a subject who has bacterial vaginosis (BV) and/or a risk of the BV, wherein the subject is at least about 5 years old, 10 years old or at least about 15 years old. In some embodiments, the subject is at most about 80 years old, about 70 years old, about 65 years old, about 60 years old, about 55 years old, or about 50 years old. In some embodiments, a method can comprise of administering the pharmaceutical composition to a subject who has necrotizing enterocolitis (NEC) and/or a risk of the NEC wherein the subject is at least about 1 day old and at most about 1 year old and the subject is a premature infant. In some embodiments, the pharmaceutical composition can be administered to the subjects who have microbial dysbiosis in the gastrointestinal (GI) tract or vagina.

[0327] In some instances, a pharmaceutical composition may be administered to a subject having or suspected of having a disease or disease condition. In some cases, a pharmaceutical composition may be administered to a subject having a disease or disease condition. In other cases, a pharmaceutical composition may be administered to a subject suspected of having a disease or disease condition. In some cases, a pharmaceutical composition may be administered to a subject to treat a disease or disease condition in the subject. In some cases, a pharmaceutical composition may be administered to a subject to prevent a disease or disease condition in the subject. In some cases, when used to prevent a disease, the subject may not have developed the disease or disease condition before being administered with the pharmaceutical composition.

[0328] In some instances, a disease or disease condition treated/prevented by a pharmaceutical composition may comprise a disease or disease condition associated with microbial dysbiosis. Microbial dysbiosis is a reduction in microbial diversity that creates an imbalance in the microbial community of certain areas of the body, including but not limited to the gut and the vagina, resulting in inflammatory disease or disease condition. In some cases, the disease can comprise a vaginal disease or disease condition or gastrointestinal disease or disease condition (such as an infant gastrointestinal disease or disease condition).

[0329] A disease or disease condition may comprise a disease or a complication associated with the disease. For example, the complication associated with the disease may comprise a symptom or condition that develops subsequently to or concurrently with a subject has developed the disease or disease condition. In some cases, the development of the disease may increase the risk of symptoms or conditions. The development of the disease or disease condition may directly facilitate the development of the complication. The development of the disease or disease condition may indirectly facilitate the development of the complication.

[0330] In some cases, a subject administered with the pharmaceutical compositions described herein and thereof may comprise a human subject.

[0331] For infant gastrointestinal diseases, a human subject that is administered with the pharmaceutical compositions described herein and thereof, in some cases, have an age of at least about 1 day old, at least about 2 days old, at least about 3 days old, at least about 4 days old, at least about 5 days old, at least about 6 days old, at least about 1 week old, at least about 2 weeks old, at least about 3 weeks old, at least about 4 weeks old, at least about 1 month old, at least about 2 months old, at least about 3 months old, at least about 4 months old, at least about 5 months old, at least about 6 months old, at least about 7 months old, at least about 8 months old, at least about 9 months old, at least about 10 months old, at least about 11 months old, or at most about 1 year old. For infant gastrointestinal disease or disease condition, a human subject may be an infant or a neonate. In some cases, the infant may be a preterm infant or a neonate.

[0332] For vaginal diseases, a human subject may be an infant of an adult. For vaginal disease or disease condition, a human subject may be at least about 2 years old, at least about 3 years old, at least about 4 years old, at least about 5 years old, at least about 6 years old, at least about 7 years old, at least about 8 years old, at least about 9 years old, at least about 10 years old, at least about 11 years old, at least about 12 years old, at least about 13 years old, at least about 14 years old, at least about 15 years old, at least about 16 years old, at least about 17 years old, at least about 18 years old, at least about 19 years old, at least about 20 years old, at least about 21 years old, at least about 22 years old, at least about 23 years old, at least about 24 years old, at least about 25 years old, at least about 26 years old, at least about 27 years old, at least about 28 years old, at least about 29 years old, at least about 30 years old, at least about 31 years old, at least about 32 years old, at least about 33 years old, at least about 34 years old, at least about 35 years old, at least about 36 years old, at least about 37 years old, at least about 38 years old, at least about 39 years old, at least about 40 years old, at least about 41 years old, at least about 42 years old, at least about 43 years old, at least about 44 years old, at least about 45 years old, at least about 46 years old, at least about 47 years old, at least about 48 years old, at least about 49 years old, at least about 50 years old, at least about 51 years old, at least about 52 years old, at least about 53 years old, at least about 54 years old, at least about 55 years old, at least about 56 years old, at least about 57 years old, at least about 58 years old, at least about 59 years old, at least about 60 years old, at least about 61 years old, at least about 62 years old, at least about 63 years old, at least about 64 years old, at least about 65 years old, at least about 66 years old, at least about 67 years old, at least about 68 years old, at least about 69 years old, at least about 70 years old, at least about 71 years old, at least about 72 years old, at least about 73 years old, at least about 74 years old, at least about 75 years old, at least about 76 years old, at least about 77 years old, at least about 78 years old, at least about 79 years old, at least about 80 years old, at least about 81 years old, at least about 82 years old, at least about 83 years old, at least about 84 years old, at least about 85 years old, at least about 86 years old, at least about 87 years old, at least about 88 years old, at least about 89 years old, at least about 90 years old, at least about 91 years old, at least about 92 years old, at least about 93 years old, at least about 94 years old, at least about 95 years old, at least about 96 years old, at least about 97 years old, at least about 98 years old, at least about 99 years old, or at least about 100 years old.

[0333] In some cases, a vaginal disease can comprise BV. A vaginal disease can comprise recurrent BV. A complication associated with a vaginal disease can comprise pre-term birth, birth/pregnancy complications, STIs (such as HIV Chlamydia, Gonorrhea, Suphilis, Trichomoniasis), pelvic inflammatory disease (PID), vulvovaginitis) or a combination thereof. The complication associated with BV can comprise pre-term birth. The complication associated with BV can comprise STIs or a risk thereof. The complication associated with BV can comprise birth/pregnancy complications. In some In some cases, BV can comprise recurrent BV. In some cases, the pharmaceutical composition described herein can treat or prevent morbidity associated with the BV or the complication associated with BV. The complication associated with BV can comprise PID. The complication associated with BV can comprise vulvovaginitis.

[0334] In some cases, a gastrointestinal disease can comprise infant gastrointestinal disease. An infant gastrointestinal disease can comprise NEC, infectious gastroenteritis, neonatal cholestasis, pediatric intestinal motility disorder, gastroenteritis, Inflammatory bowel disease (IBD), Irritable bowel syndrome (IBS), or a combination thereof. An infant gastrointestinal disease can comprise NEC. An infant gastrointestinal disease can comprise infectious gastroenteritis. An infant gastrointestinal disease can comprise neonatal cholestasis. An infant gastrointestinal disease can comprise intestinal motility disorder. An infant gastrointestinal disease can comprise gastroenteritis. An infant gastrointestinal disease can comprise Inflammatory bowel disease (IBD). An infant gastrointestinal disease can comprise Irritable bowel syndrome (IBS). An infant gastrointestinal disease can comprise morbidity associated with gastrointestinal tract complications or NEC.

[0335] In some instances, a disease or disease condition treated by a pharmaceutical composition may comprise an inflammatory disease. In some cases, an inflammatory disease treated by a pharmaceutical bacterial population may comprise bacterial vaginosis or necrotizing enterocolitis. In some cases, a disease treated by a pharmaceutical composition may comprise BV, an inflammatory disease of the vagina resulting from a dysbiosis of the vaginal microbiome, resulting in symptoms of vaginal discharge, vaginal odor, vaginal itching, and/or burning during urination. In some cases, an inflammatory disease treated by a pharmaceutical composition may comprise necrotizing enterocolitis, an inflammatory gastrointestinal disease associated with dysbiosis of the preterm gut microbiota, resulting in symptoms of abdominal pain and swelling, changes in heart rate, blood pressure, body temperature, and breathing, diarrhea with bloody stool, green or yellow vomit, lethargy, refusal to eat or lack of weight gain, and can be fatal.

[0336] The pharmaceutical composition described herein can be used to treat or prevent BV in a human subject. In some cases, the human subject has not been treated for BV. In some cases, the human subject has been treated for BV. For example, a human subject that has been for BV may have been administered for an antibiotic. The antibiotic may be used to inhibit or eliminate a vaginal pathogen as described herein. In some cases, the human subject that is being treated with the pharmaceutical composition as described herein has been treated with a medication that targets BV. In some cases, the human subject has recurrent BV (i.e., the human subject has suffered from BV previously). In some cases, the human subject has not suffered from BV previously.

[0337] A pharmaceutical composition herein can be administered for various periods of time according to different administration schedules. A treatment period may vary between subjects and individuals and can depend on various factors as described herein, e.g., disease state, age, etc. In some instances, a subject can be treated for one day to at least about one week, for about a week to about one month, or for about one month to about one year. In such instances, a subject can be treated for about one month, two months, or three months. In some cases, treatment can be performed on consecutive days, consecutive weeks, and/or consecutive months. In some embodiments, a pharmaceutical composition is administered for about 28, 29, or 30 consecutive days.

[0338] Methods of treatment herein can include administering a pharmaceutical composition of this disclosure once, two, three, four, five, six, seven, eight, nine, ten, eleven, or twelve times daily. In various instances, a pharmaceutical composition of this disclosure is administered twice daily. Such twice daily administration can be performed in the morning and in the evening, in the morning and in the afternoon, in the afternoon and the evening, in the morning and at night, in the afternoon and at night, and in the evening at night. In such cases, there can be a period of about less than 1, 1, 2, 3, 4, 5, 6, 7, 8, 9, 10, 11, 12, 13, 14, 15, 16, 17, 18, 19, 20, 21, 22, 23, or 24 hours between the first and the second administration of a given day.

### Method of Identifying a Bacterial Population

[0339] Provided herein are method of identifying bacterial strains described. In some cases, the method comprises providing a first bacterial strain. In some cases, the method comprises generating a plurality of cultures, In some cases, one of the plurality of cultures comprises the first bacterial strain and: (1) a given bacterial strain of a plurality of bacterial strains or (2) a metabolite generated by the given bacterial strain. In some cases, each of the plurality of cultures comprises the first bacterial strain and: (1) a given bacterial strain of a plurality of bacterial strains or (2) a metabolite generated by the given bacterial strain. In some cases, the method comprises determining a culture of the plurality of cultures that is capable of exhibiting a sufficient ability or a collective effect on the disease associated function as described herein.

[0340] In some cases, the method comprises: (a) providing a first bacterial strain; (b) generating a plurality of cultures in which a culture of the plurality of cultures comprises the first bacterial strain and: (1) a given bacterial strain of a plurality of bacterial strains or (2) a bacterial product generated by the given bacterial strain; and (c) determining a culture of the plurality of cultures of (b) that is capable of exhibiting a sufficient ability or a collective effect on the disease associated function as described herein, thereby identifying the given bacterial strain to generate the bacterial combination comprising the first bacterial strain and the given bacterial strain. In some cases, the method comprises: (a) providing a first bacterial strain; (b) generating a plurality of cultures, each comprising the first bacterial strain and: (1) a given bacterial strain of a plurality of bacterial strains or (2) a bacterial product generated by the given bacterial strain; and (c) determining a culture of the plurality of cultures of (b) that is capable of exhibiting a sufficient ability or a collective effect on the disease associated function as described herein, thereby identifying the given bacterial strain to generate the bacterial combination comprising the first bacterial strain and the given bacterial strain. In some cases, the first bacterial strain may comprise a recipient bacterial strain as described herein. In some cases, the plurality of bacterial strains of (b) may comprise a list of potential donor bacterial strains. In some cases, the culture of (b) may comprise the first bacterial strain and a cultured medium or supernatant thereof of a given bacterial strain of a plurality of bacterial strains. In some cases, the method comprises: (a) providing a first bacterial strain or a bacterial product generated by the first bacterial strain; (b) generating a plurality of cultures, each comprising: a given bacterial strain of a plurality of bacterial strains and (1) the first bacterial strain or (2) a bacterial product generated by the first bacterial strain; and (c) determining a culture of the plurality of cultures of (b) that is capable of exhibiting a sufficient ability or a collective effect on the disease associated function as described herein, thereby identifying the given bacterial strain to generate the bacterial combination comprising the first bacterial strain and the given bacterial strain. In some cases, the first bacterial strain may comprise a donor bacterial strain as described herein. In some cases, the plurality of bacterial strains of (b) may comprise a list of potential recipient bacterial strains. In some cases, the culture of (b) may comprise the second bacterial strain and a cultured medium or supernatant thereof of the first bacterial strain. In some cases, determining a culture of the plurality of cultures of (b) that is capable of exhibiting a sufficient ability or a collective effect on the disease associated function as described herein in process (c) may comprise determining whether a cultured medium of the culture of (b); supernatant thereof; or a bacterial product generated by the bacterial strains of the cultured medium of the culture of (b) exhibit a sufficient ability or an collective effect on the disease associated function as described herein. The identified bacterial population can be used to treat or prevent any disease or disease conditions as described herein. In some cases, methods for determining a bacterial population as described herein can comprise the methods described in EXAMPLEs 1-11.

[0341] As an illustrative example, for identifying the two bacterial strains for generating a collective bacterial population, the two bacterial strains may each have at least one sufficient ability in a disease associated function, as described herein (see, e.g., the candidate bacterial strains described in EXAMPLE 1). In some cases, each of the two bacterial strains may have at least one sufficient ability in a disease associated function different from that of the other.

[0342] In some embodiments, a method of creating the pharmaceutical composition can comprise providing a plurality of bacterial strains, culturing a given bacterial strain of the plurality of bacterial strains in a carbon source of a plurality of carbon sources, measuring the growth of the plurality of bacterial strains, and selecting a bacterial strain of the plurality of bacterial strains. In some embodiments, the bacterial strain, when combined within a medium comprising the carbon source and a second bacterial strain or a supernatant of the medium comprising the carbon source and the second bacterial strain, exhibits a growth of at least about 101%, 105%, 110%, 115%, 120%, 130%, 140% 150%, 160%, 170%, 180%, 190%, 200%, 250%, 300%, 350%, 400%, 450%, 500%, 550%, 600%, 650%, 700%, 750%, 800%, 850%, 900%, 950%, 999%, 1000%, or 1100% by weight as compared to growth of the first bacterial strain when combined with in a medium comprising the carbon source in an absence of the second bacterial strain or the supernatant of the medium comprising the carbon source and the second bacterial strain. In some embodiments, the carbon source does not comprise starch.

[0343] In some embodiments, the supernatant of the medium comprising the carbon source and second bacterial strain is cell-free or comprises a fermented product derived from the second bacterial strain.

[0344] In some embodiments, a method of creating the pharmaceutical composition can comprise providing a plurality of bacterial strains, culturing a given bacterial strain of the plurality of bacterial strains in a carbon source of a plurality of carbon sources, measuring the growth of the plurality of bacterial strains, and selecting a bacterial strain of the plurality of bacterial strains wherein the bacterial strain, when combined with a medium comprising a secreted metabolite (or bacterial product) derived from a second bacterial strain, proliferates for at least about 10 cell divisions. In some embodiments, the medium can comprise secreted metabolite (or bacterial product)s derived from the second bacterial strain which can consist of a supernatant derived from the growth culture of the second bacterial strain, which can be cell-free.

[0345] In some embodiments, a method of creating the pharmaceutical composition can comprise providing a plurality of bacterial strains, culturing a given bacterial strain of the plurality of bacterial strains in a carbon source of a plurality of carbon sources, measuring the growth of the plurality of bacterial strains, and selecting a bacterial strain of the plurality of bacterial strains wherein the bacterial strains, when combined with in a medium comprising a secreted metabolite (or bacterial product) derived from the second bacterial strain and a layer of epithelia cells, decreases a gas permeability of the layer of epithelial cells by at least about 1%, 2%, 3%, 4%, 5%, 10%, 20%, 30%, 40%, 50%, 60%, 70%, 80%, 90%, 99%, or 100% as compared to gas permeability of a layer of epithelial cells combined with in a medium comprising the bacterial strain in an absence of the secreted metabolite (or bacterial product), and wherein the gas permeability of the epithelial cells can be measured by transport of a Fluorescein isothiocyanate (FITC)-conjugated dextran across the layer of epithelial cells. In some embodiments, the mammalian epithelial cells can comprise mammalian epithelial cells, which can further be comprised of human epithelial cells. In some embodiments, the medium can comprise the secreted metabolite (or bacterial product) derived from the second bacterial strain, which can be cell-free or a fermentation product.

[0346] In some embodiments, a method of creating the pharmaceutical composition can comprise providing a plurality of bacterial strains, culturing a given bacterial strain of the plurality of bacterial strains in a carbon source of a plurality of carbon sources, measuring the growth of the plurality of bacterial strains, and selecting a bacterial strain of the plurality of bacterial strains wherein a secreted metabolite (or bacterial product) or an inviable cell derived from the bacterial strain, when combined with an engineered cell comprising a reporter, decreases a signal of the reporter by at least about 1%, 2%, 3%, 4%, 5%, 10%, 20%, 30%, 40%, 50%, 60%, 70%, 80%, 90%, 99%, or 100% as compared to a signal of the reporter when the engineered cell is not combined with the metabolite (or bacterial product) or the inviable cell derived from the bacterial strain. In some embodiments, the medium can comprise the secreted metabolite (or bacterial product) derived from the second bacterial strain, which can be cell-free or a fermentation product. In some embodiments, the engineered cell can comprise a macrophage. In some embodiments, the inviable cell can comprise a pasteurized cell. In some embodiments, the reporter can comprise a NFkB reporter or an interferon-sensitive response element reporter (ISRE). In some embodiments, the NFkB reporter comprises a secreted embryonic alkaline phosphatase (SEAP) reporter. In some embodiments, the ISRE reporter comprises a Lucia luciferase.

[0347] In some embodiments, a method of creating the pharmaceutical composition can comprise providing a plurality of bacterial strains, culturing a given bacterial strain of the plurality of bacterial strains in a carbon source of a plurality of carbon sources, measuring the growth of the plurality of bacterial strains, and selecting a bacterial strain of the plurality of bacterial strains wherein the bacterial strain, when combined with a medium for at most about 15 hours, comprising the second bacterial strain or a supernatant thereof, exhibits a growth of at least about 101%, 105%, 110%, 120%, 130%, 140%, 150%, 160%, 170%, 180%, 190%, 199%, 200%, or more than 200% by colony-forming unit (CFU) as compared to a growth of the bacterial strain when combined with in a medium for at most about 15 hours not comprising the second bacterial strain or the supernatant thereof. In some embodiments, the supernatant comprises a secreted metabolite (or bacterial product) derived from the second bacterial strain, or fermentation product, which can be cell-free.

[0348] In some embodiments, a method of creating the pharmaceutical composition can comprise providing a plurality of bacterial strains, culturing a given bacterial strain of the plurality of bacterial strains in a carbon source of a plurality of carbon sources, measuring the growth of the plurality of bacterial strains, and selecting a bacterial strain of the plurality of bacterial strains wherein the first bacterial strain is configured to utilize a metabolite (or bacterial product) derived from the second bacterial strain as an energy source. In some embodiments, the metabolite (or bacterial product) is not butyrate.

[0349] In some embodiments, a method of creating the pharmaceutical composition can comprise providing a plurality of bacterial strains, culturing a given bacterial strain of the plurality of bacterial strains in a carbon source of a plurality of carbon sources, measuring the growth of the plurality of bacterial strains, and selecting a bacterial strain of the plurality of bacterial strains wherein the bacterial strain is incapable of using sialic acid as the carbon source. In some embodiments, the bacterial population when combined in the medium comprising the sialic acid, may not exhibit a growth of at least about 101%, 105%, 110%, 120%, 130%, 140%, 150%, 160%, 170%, 180%, 190%, 199%, 200%, or more than 200% by weight as compared to the growth of the reference bacterial population when combined with in the medium comprising glucose as a carbon source or sole carbon source.

[0350] The term “about” or “approximately” as used herein when referring to a measurable value such as an amount or concentration and the like, is meant to encompass variations of 20%, 10%, 5%, 1%, 0.5%, or even 0.1% of the specified amount. For example, “about” can mean plus or minus 10%, per the practice in the art. Alternatively, “about” can mean a range of plus or minus 20%, plus or minus 10%, plus or minus 5%, or plus or minus 1% of a given value. Alternatively, particularly with respect to biological systems or processes, the term can mean within an order of magnitude, up to 5-fold, or up to 2-fold, of a value. Where particular values can be described in the application and claims, unless otherwise stated the term “about” meaning up to an acceptable error range for the particular value should be assumed. Also, where ranges, subranges, or both, of values can be provided, the ranges or subranges can include the endpoints of the ranges or subranges. The terms “substantially”, “substantially no”, “substantially free”, and “approximately” can be used when describing a magnitude, a position or both to indicate that the value described can be up to a reasonable expected range of values. For example, a numeric value can have a value that can be +/−0.1% of the stated value (or range of values), +/−1% of the stated value (or range of values), +/−2% of the stated value (or range of values), +/−5% of the stated value (or range of values), +/−10% of the stated value (or range of values), etc. Any numerical range recited herein can be intended to include all sub-ranges subsumed therein.

[0351] The term “and/or” as used in a phrase such as “A and/or B” herein is intended to include both A and B; A or B; A (alone); and B (alone). Likewise, the term “and/or” as used in a phrase such as “A, B, and/or C” is intended to encompass each of the following embodiments: A, B, and C; A, B, or C; A or C; A or B; B or C; A and C; A and B; B and C; A (alone); B (alone); and C (alone).

[0352] Whenever the term “no more than,” “less than,” or “less than or equal to” precedes the first numerical value in a series of two or more numerical values, the term “no more than,” “less than,” or “less than or equal to” applies to each of the numerical values in that series of numerical values. For example, less than or equal to 3, 2, or 1 is equivalent to less than or equal to 3, less than or equal to 2, or less than or equal to 1.

[0353] The term “a” or “an” as used herein refers to one or to more than one (i.e., to at least one) of the grammatical object of the article. By way of example, “an element” means one element or more than one element.

[0354] Percent (%) sequence identity or homology with respect to a reference polynucleotide sequence is the percentage of nucleotide residues in a candidate sequence that are identical with the nucleotide residues in the reference polynucleotide sequence, after aligning the sequences and introducing gaps, if necessary, to achieve the maximum percent sequence identity, and not considering any substitutions as part of the sequence identity. Alignment for purposes of determining percent polynucleotide sequence identity can be achieved in various ways that are known for instance, using publicly available computer software such as BLAST, BLAST-2, ALIGN or Megalign (DNASTAR) software. Appropriate parameters for aligning sequences are able to be determined, including algorithms needed to achieve maximal alignment over the full length of the sequences being compared. For purposes herein, however, % nucleotide sequence identity values are generated using the sequence comparison computer program ALIGN-2. The ALIGN-2 sequence comparison computer program was authored by Genentech, Inc., and the source code has been filed with user documentation in the U.S. Copyright Office, Washington D.C., 20559, where it is registered under U.S. Copyright Registration No. TXU510087. The ALIGN-2 program is publicly available from Genentech, Inc., South San Francisco, Calif, or may be compiled from the source code. The ALIGN-2 program can be compiled for use on a UNIX operating system, including digital UNIX V4.0D. All sequence comparison parameters are set by the ALIGN-2 program and do not vary. In situations where ALIGN-2 is employed for polynucleotide sequence comparisons, the % nucleotide sequence identity of a given nucleotide sequence A to, with, or against a given nucleotide sequence B (which can alternatively be phrased as a given nucleotide sequence A that has or comprises a certain % nucleotide sequence identity to, with, or against a given nucleotide sequence B) is calculated as follows: 100 times the fraction X/Y, where X is the number of nucleotide residues scored as identical matches by the sequence alignment program ALIGN-2 in that program's alignment of A and B, and where Y is the total number of nucleotide residues in B. It will be appreciated that where the length of nucleotide sequence A is not equal to the length of nucleotide sequence B, the % nucleotide sequence identity of A to B will not equal the % nucleotide sequence identity of B to A. Unless specifically stated otherwise, all % nucleotide sequence identity values used herein are obtained as described in the immediately preceding paragraph using the ALIGN-2 computer program. % sequence identity can be converted into % sequence complementary based on canonical base-pairing.

[0355] Isolated strains disclosed herein have been deposited in the DSM Leibniz Institute DSMZ—German Collection of Microorganisms and Cell Cultures, Inhoffenstr. 7B, D-38124 Braunschweig, Germany in accordance with and under the provisions of the Budapest Treaty for the Deposit of Microorganisms, i.e., they will be stored with all the care necessary to keep them viable and uncontaminated for a period of at least five years after the most recent request for the furnishing of a sample of the deposits, and in any case, for a period of at least 30 (thirty) years after the date of deposit or for the enforceable life of any patent which may issue disclosing the cultures plus five years after the last request for a sample from the deposit. The strains were tested by the DSMZ and determined to be viable. The DSMZ has assigned the following deposit accession numbers (in parentheses in the following) to the strains:
[0356] (1) Lactobacillus crispatus ST100 (DSM 33187), which was deposited on Jun. 27, 2019;
[0357] (2) Bifidobacterium bifidum ST31 (DSM 34533), Bifidobacterium bifidum ST80 (DSM 34534), Lactobacillus plantarum ST65 (DSM 34526), Lactobacillus crispatus ST20 (DSM 34527), Lactobacillus crispatus ST112 (DSM 34529), Lactobacillus gasseri ST105 (DSM 34528), Lactobacillus jensenii ST21 (DSM 34525), which were deposited on Jan. 26, 2023.

[0358] The depositor acknowledges the duty to replace the deposits should the depository be unable to furnish a sample when requested, due to the condition of the deposits. All restrictions on the availability to the public of the subject culture deposits will be irrevocably removed upon the granting of a patent disclosing them. The deposits are available as required by foreign patent laws in countries wherein counterparts of the subject application, or its progeny, are filed. However, it should be understood that the availability of a deposit does not constitute a license to practice the subject matter disclosed herein in derogation of patent rights granted by governmental action.

[0359] While various embodiments of the disclosure have been shown and described herein, it will be obvious to those skilled in the art that such embodiments are provided by way of example only. Numerous variations, changes, and substitutions may occur to those skilled in the art without departing from the disclosure. It should be understood that various alternatives to the embodiments of the disclosure described herein may be employed.

### EXAMPLES

[0360] These examples are provided for illustrative purposes only and not to limit the scope of the claims provided herein.

### Example 1: Constructing a Collective Microbial Consortium

[0361] Provided herein are methods for evaluating individual microbial strains for building a collective microbial consortium, as described herein. A collective microbial consortium may be a bacterial population as described herein.

[0362] High-value strains underwent a strain selection process, as shown in FIG. 17, in which collective consortia with desirable mechanisms were generated. In process 1701, microbiome data from healthy individuals, public microbiome datasets (e.g., Olm et al., Sci Adv. 2019 Dec. 11; 5; Shao et al., Nature. 2019 October; 574(7776):117-121; Zhou et al., PLoS One. 2015 Mar. 5; 10(3):e0118632; Sobel et al., J Clin Microbiol. 2019 Apr. 26; 57(5):e00227-19; Tamraker et al., BMC Infect Dis. 2007 Nov. 7; 7:128; Ravel et al., Proc Natl Acad Sci USA. 2011 Mar. 15; 108 Suppl 1(Suppl 1):4680-7; France et al., Microbiome. 2020; 8: 166; and Munoz et al., Microbiome. 2021 Jul. 26; 9(1):163, each of which is incorporated by reference in its entirety), and microbiome profiles from clinical studies were analyzed to identify bacterial species consistently and significantly associated with healthy outcomes or protection from disease onset or recurrence. In process 1702, stool and vaginal microbiota samples were collected from healthy volunteers, and bacterial species and strains of interest identified in process 1701 were targeted for isolation and culture using enrichment and selective bacteriological culture media such as those described in EXAMPLE 5. In process 1703, bacterial isolates were genotyped using 16S rRNA gene sequencing and were selected based on in the selection criteria process 1701, such as those described in EXAMPLE 9. Additionally, and/or optionally, whole genome sequencing analysis was performed on the selected bacterial strains for functional capacity and genome-based risks factors, such as those described in EXAMPLE 9. In process 1704, individual selected bacterial strains were screened for disease-specific mode-of-actions (MOAs) and therapeutic functionality, such as those described in EXAMPLEs 2-3, 6, 8, and 10-11. selected bacterial strains that have sufficient ability when assessed using disease-specific MOA or functionality assays were identified as candidate bacterial strains for generating a collective bacterial consortium. In process 1705, the collective activities of individual candidate bacterial strains of interest were characterized through cross-feeding studies to identify candidate bacterial strains to function collectiveally in a collective microbial consortium, such as those described in EXAMPLEs 7-8. Such methods can also identify the bacterial strains as being a donor or recipient bacterial strain. In process 1706, consortia are evaluated for their ability to positively impact disease-specific MOAs and functionality, such as those described in EXAMPLE 4. Optionally, the consortia can be determined if they can treat the disease or alleviate the symptom(s) of the diseases.

### Example 2: BV-Specific Mode-Of-Actions (MOAs) and Functionality Assays

[0363] Provided herein are methods for determining BV-specific MOAs and functionality of the selected bacterial strains for identifying candidate bacterial strains for generating collective microbial consortium for treating or preventing BV.

[0364] selected bacterial strains were subjected to at least one of the following assays: (1) vaginal epithelia cell (VEC) adhesion assay; (2) vaginally relevant carbohydrate utilization assay; (3) vaginal pathogen growth/biofilm inhibition assay; (4) growth in vaginal pH; and (5) bacterial product generation that is relevant to treat or prevent BV, for identifying candidate bacterial strains with collective therapeutic potential for preventing and treating BV. The selected bacterial strains had sufficient ability to: adhere to VEC, utilize vaginally relevant carbohydrate, growing in vaginal pH, generating a bacterial product that is relevant to treat or prevent BV, and/or inhibit vaginal pathogen growth/biofilm formation.

### VEC Adhesion Assay

[0365] selected bacterial strains should have a sufficient ability to adhere to the VECs. Such ability can indicate that the bacterial strain is capable of long-term engraftment or colonization in the human vaginal tract of individuals, patients, or subjects being administered with a collective microbial consortium comprising the strains capable of sufficient VEC adherence. When a bacterial strain has a sufficient ability to adhere to VEC, it also can exclude vaginal pathogens from adhering to VEC.

[0366] In VEC adhesion assay, selected bacterial strains were individually tested for adherence to the VEC. The VECs (VK2/E6E7; ATCC, CRL-2616) were cultured in complete media (Keratinocyte-Serum Free medium (Gibco-BRL 17005-042) with 0.1 ng/ml human recombinant EGF, 0.05 mg/ml bovine pituitary extract, and calcium chloride 44.1 mg/L) with 1% Penicillin and Streptomycin (Gibco 15140-122)) at 37° C. in an atmosphere of 5% CO². The VECs were digested with 2 mL of 0.25% trypsin-EDTA (Gibco 25200056) for 5 mins and the digestion was terminated by adding 8 mL of 10% FBS DMEM-F12 (ATCC 30-2006). The supernatant was removed after the centrifugation for 5 mins at 150×g, and the cells were adjusted to a concentration to 2.5×10⁵ cells/mL using the complete media without Penicillin and Streptomycin. The VEC suspensions were aliquoted into individual wells of a 6-well-culture plate (2 mL/well) and incubated at 37° C. in an atmosphere of 5% CO² for 18 hours. After the incubation, when each culture well was about 50-60% confluent, the cells were washed with 10% FBS DMEM-F12 media, and the cells were co-incubated with the candidate bacteria.

[0367] The selected bacterial strains were cultured in vegan MRS media (HIMEDIA MV369-500) in for overnight in the anaerobic chamber incubator at 37° C. The bacteria were then pelleted and resuspended in 5 mL of PBS for washing at least twice. The bacteria were then resuspended in RPMI-1640 media (5 mL/culture; Sigma R8758-500 mL) and adjusted to 1.0×10\hat{ }8 CFU/mL using RPMI-1640 media.

[0368] 1 mL of bacterial cell suspension was added to each well of 6-well-culture plates with monolayer of VECs, and the mixture of cells were incubated for 1 hour at 37° C. in an atmosphere of 5% CO². The mixture was then washed at least 5 times with PBS to remove non-adhering bacteria. At the last wash, the mixture was vigorously pipetted 20 times as a final wash. PBS was then removed, and 200 μL of 1% Triton X-100 was added to each culture. The mixture was well thoroughly suspended and incubated for 10 minutes at room temperature (RT). An additional 1800 μL of PBS was added to the mixture and vigorously pipetted for 20 times. The collected PBS-resuspended cells from were plated on to MRS plates with 10\hat{ }-1 to 10\hat{ }-7 dilutions. The number of bacterial cells adhered to the VEC was measured as plotted as the log [CFU of bacteria/9.5 cm\hat{ }2 VEC].

[0369] The summary of the result is shown in TABLE 8. As an illustrative example, the top 20% percentile of vaginal bacterial isolates (that were tested), as quantified with a greater than 2×10\hat{ }6 CFU/9.5 cm\hat{ }2 adherence to human VEC, were identified to have sufficient ability to adhere to VEC and identified as candidate bacterial strains for collective microbial consortium for treating or preventing BV.

TABLE 8
Summary of BV-specific MOA and functionality assays for exemplary strains and control

| | | % Growth compared | | | | | |
|---|---|---|---|---|---|---|---|
| | % Growth between | between conditioned | | | | | |
| | carbon source | medium tested and | | | | | |
| | tested and carbon | carbon source as | | | | | |
| | source as glucose | glucose | | | | | |
| | carbon source | ST100 conditioned | | | | | D-lactic acid |
| | tested: Glycogen | medium with carbon | | Vaginal | Acidic pH | | Production (RLU |
| | carbon source | source as glycogen | G. vaginalis | Epithelial | Tolerance | | [relative light |
| | tested: Maltose | ST112 conditioned | Biofilm | Cells | (Growth % | H2O2 | unit])/L-lactic |
| Bacterial | carbon source | medium with carbon | Inhibition | Adhesion | at pH 4.0 | Production | acid Production |
| strain | tested: Maltodextrin | source as glycogen | (% Reduction) | (log CFU/9.5 cm²) | vs pH 6.0) | (uM) | (RLU |
| L. | 60% | 0% | 40% | 5.6 | 67% | 650 | 2.00E+04 |
| crispatus | 100% | 50% | | | | | 1.00E+05 |
| ST100 | 90% | | | | | | |
| L. | 20% | 50% | 30% | 4.27 | 10.80% | 783 | 2.00E+04 |
| crispatus | 90% | 10% | | | | | 1.30E+05 |
| ST112 | 80% | | | | | | |
| L. | 0% | 10% | 40% | 6.00 | 1.25% | 1300 | 9.70E+04 |
| crispatus | 110% | 20% | | | | | 9.80E+03 |
| ST20 | 110% | | | | | | |
| L. | 10% | 90% | 50% | 4.8 | 70.50% | 1614 | 4.30E+04 |
| jensenii | 130% | 90% | | | | | 2.00E+04 |
| ST21 | 120% | | | | | | |
| L. | 0% | 70% | 40% | 6.58 | 40.70% | 799 | 1.80E+04 |
| gasseri | 80% | 100% | | | | | 1.40E+05 |
| ST105 | 0% | | | | | | |
| L. | 0% | Not tested | 0% | 5.68 | 3.20% | 741 | 6.20E+04 |
| jensenii | 70% | | | | | | 7.00E+03 |
| ST77 | 60% | | | | | | |
| L. | 0% | 200% | 20% | 5.41 | 52.50% | 1851 | 4.80E+04 |
| jensenii | 150% | 140% | | | | | 3.00E+04 |
| ST13 | 30% | | | | | | |
| L. | 40% | 90% | 10% | 6.48 | 26.40% | 856 | 2.00E+04 |
| crispatus | 100% | 100% | | | | | 1.50E+05 |
| ST43 | 90% | | | | | | |
| LP01 | Not tested | Not tested | 45% | Not tested | Not tested | Not tested | Not tested |
| | Not tested | Not tested | | | | | Not tested |
| | Not tested | | | | | | |
| LBV96 | Not tested | Not tested | 31% | Not tested | Not tested | Not tested | Not tested |
| | Not tested | Not tested | | | | | Not tested |
| | Not tested | | | | | | |
| LBV88 | Not tested | Not tested | 50% | Not tested | Not tested | Not tested | Not tested |
| | Not tested | Not tested | | | | | Not tested |
| | Not tested | | | | | | |

N/A: not applicable

### Vaginally Relevant Carbohydrate Utilization Assay

[0370] The candidate bacterial strains should have a sufficient ability to utilize vaginally relevant carbohydrate. Provided herein are methods for the preparation and execution of vaginally relevant carbohydrate utilization screening for identifying candidate bacterial strains with sufficient ability to utilize vaginal carbohydrates and growth factors that can promote host colonization and therapeutic efficacy. Such strains can be used as the candidate bacterial strains of a collective microbial consortium described herein. FIG. 2 illustrates the overall direct carbohydrate utilization screening method.

### 1. Preparation of the Carbohydrate Stock Solutions

[0371] Generally, the procedures for preparing carbohydrate stock solutions as described herein can be used for culturing and screening obligatory and facultative anaerobic bacterial strains. The exemplary bacterial strains in this example were isolated from vaginal swabs collected from healthy female donors and were grown on selective or enrichment culture media (e.g., see EXAMPLE 5).

[0372] First, the carbohydrate stock solutions were prepared by dissolving each carbohydrate listed in TABLE 9 (excluding mucin, guar gum, pectin, and inulin) in Milli-Q water to create a 20% carbohydrate solution, 10× the Final Concentration percentage listed in TABLE 9. Mucin was dissolved Milli-Q water to create a 3% stock solution, 10× the Final Concentration percentage.

TABLE 9
Carbohydrate Compound Library.

| | | Catalog | | Final % |
|---|---|---|---|---|
| Carbohydrate | Vendor | Number | Category | Concentration |
| Maltose | ThermoFisher | A16266.22 | Glycogen | 2 |
| | | | metabolite | |
| Mucin | Sigma | M1778-100G | Host | 0.3 |
| Glycogen | Sigma | G0885-5G | Host | 2 |
| Melibiose | Sigma | M5500-5G | Disaccharide | 2 |
| N- | Carbosynth | MA00746 | Deoxysugar | 2 |
| Acetylneuraminic | | | | |
| acid (Sialic Acid) | | | | |
| N-Acteyl | Sigma | A3286-100G | Amino sugar | 2 |
| Glucosamine | | | | |
| Maltodextrin | Spectrum | M1083 | Glycogen | 2 |
| | | | metabolite | |
| D-Glucose | Sigma | G7021 | Monosaccharide | 2 |
| D-Glucose + | Sigma | G7021 | Monosaccharide | 2 |
| 0.1% cysteine | VWR (cysteine) | J994-100G (cysteine) | Amino acid | |

[0373] Excluding mucin, the 10× carbohydrate stock solutions were filtered through a sterile 0.22 μm PES syringe filter (Millipore). Mucin was dissolved in Milli-Q water and autoclaved to attain sterility.

### 2. Stock Carbohydrate Plates Preparation

[0374] The stock carbohydrate plates were prepared by aliquoting 20 μL of each 10× carbohydrate stock solution individually into each well of the plate in a biosafety cabinet, as diagrammed in TABLE 10. Water was added to wells B10-12, D10-12, F10-12, and H9. Row H were media and carbohydrate stock solution sterile controls. The bottom row of the plate, row H, was negative media controls to evaluate media sterility. Upon completion of stock carbohydrate plate preparation, the sterile plates were sealed with foil and stored at −80′° C.

TABLE 10
Stock Carbohydrate Plate Layout

| | 1 | 2 | 3 | 4 | 5 | 6 | 7 | 8 | 9 | 10 | 11 | 12 |
|---|---|---|---|---|---|---|---|---|---|---|---|---|
| A | strain1 | strain1 | strain1 | strain1 | strain1 | strain1 | strain1 | strain1 | strain1 | strain1 | strain1 | strain1 |
| | glycogen | glycogen | glycogen | maltose | maltose | maltose | malto- | malto- | malto- | mucin | mucin | mucin |
| | | | | | | | dextrin | dextrin | dextrin | | | |
| B | strain1 | strain1 | strain1 | strain1 | strain1 | strain1 | strain1 | strain1 | strain1 | strain1 | strain1 | strain1 |
| | sialic | sialic | sialic | melibiose | melibiose | melibiose | glucose | glucose | glucose | water | water | water |
| | Acid | Acid | Acid | | | | | | | | | |
| C | strain2 | strain2 | strain2 | strain2 | strain2 | strain2 | strain2 | strain2 | strain2 | strain2 | strain2 | strain2 |
| | glycogen | glycogen | glycogen | maltose | maltose | maltose | malto- | malto- | malto- | mucin | mucin | mucin |
| | | | | | | | dextrin | dextrin | dextrin | | | |
| D | strain2 | strain2 | strain2 | strain2 | strain2 | strain2 | strain2 | strain2 | strain2 | strain2 | strain2 | strain2 |
| | sialic | sialic | sialic | melibiose | melibiose | melibiose | glucose | glucose | glucose | water | water | water |
| | Acid | Acid | Acid | | | | | | | | | |
| E | strain3 | strain3 | strain3 | strain3 | strain3 | strain3 | strain3 | strain3 | strain3 | strain3 | strain3 | strain3 |
| | glycogen | glycogen | glycogen | maltose | maltose | maltose | malto- | malto- | malto- | mucin | mucin | mucin |
| | | | | | | | dextrin | dextrin | dextrin | | | |
| F | strain3 | strain3 | strain3 | strain3 | strain3 | strain3 | strain3 | strain3 | strain3 | strain3 | strain3 | strain3 |
| | sialic | sialic | sialic | melibiose | melibiose | melibiose | glucose | glucose | glucose | water | water | water |
| | Acid | Acid | Acid | | | | | | | | | |
| G | strain1 | strain1 | strain1 | strain2 | strain2 | strain2 | strain3 | strain3 | strain3 | | | |
| | glucose Cys | glucose | glucose | glucose | glucose | glucose | glucose | glucose | glucose | | | |
| | (cysteine) | Cys | Cys | Cys | Cys | Cys | Cys | Cys | Cys | | | |
| H | glycogen | maltose | maltodextrin | mucin | sialic | melibiose | glucose | glucose | water | | | |
| | cntrl | cntrl | cntrl | cntrl | Acid | cntrl | cntrl | cys cntrl | cntrl | | | |
| | (control) | | | | cntrl | | | | | | | |

### 3. Inoculum and Culture

[0375] First, the frozen stock carbohydrate plates were prepared for inoculation by defrosting at 37 C for 1 hour, mixed for 1 min to resuspend any precipitated carbohydrate. Thawed and resuspended plates are place in the anaerobic chamber with a vented lid for two hours before use to ensure excess oxygen was removed. The previously isolated bacterial strains Lactobacillus were cultured overnight in complete media with glucose. A 1:100 dilution of the Lactobacilli cultures was prepared in a basal media without carbohydrates (TABLE 4).

TABLE 4
MRS Without Dextrose.

| Component | Amount (g/L) |
|---|---|
| MRS Broth w/o Dextrose (Alpha | 35.2 |
| Biosciences, cat# L12-104M) | |

[0376] After dilution, 180 μL of three diluted bacterial strains were pipetted into wells of the defrosted and anaerobically stored stock carbohydrate plates as diagrammed in TABLE 10 where wells labeled “strain1” receive the first strain, wells labeled “strain2” receive the second strain, and wells labeled “strain3” receive the third strain. For the sterile media controls, 180 μL of basal media (TABLE 4) were pipetted into each well of row G and row H as diagrammed in FIG. 3. The OD₆₀₀ spectrophotometer measurement of each well of the stock carbohydrate plates was taken every 30 minutes for a 24-hour period.

[0377] The summary of the result is shown in FIG. 18 with data processed as described in EXAMPLE 8 and summarized in TABLE 8. As an illustrative example, the candidate bacterial strains were identified as having the ability to utilize glycogen (>0.5 Growth Ratio in glycogen to in Glucose), and ability to utilize maltose or maltodextrin (>0.8 Growth Ratio in maltose or maltodextrin to in Glucose). Strains in the top 20% percentile of biomass accumulation (growth) on glycogen and/or maltose or maltodextrin were considered sufficient vaginally relevant carbohydrate utilizers and selected as candidate bacterial strains for collective microbial consortium for treating or preventing BV.

### Vaginal Pathogen Growth Biofilm Inhibition Assay

[0378] Biofilm formation by vaginal or BV-associated pathogens contributes to disease progression and treatment complications using the current standard of care. Candidate bacterial strains for collective microbial consortium for the treatment and prevention of BV are identified as having the ability to inhibit biofilm formation of G. vaginalis and prevented the expansion of L. iners biofilms.

[0379] The ability of selected bacterial strains to inhibit biofilm formation by BV pathogens was assessed as follows: Condition media comprising the bacterial products from selected bacterial strains were collected by growing the strains in vegan MRS media (HIMEDIA MV369-500) in an anaerobic chamber incubator at 37° C. overnight. The following day, the cells of selected bacterial strains from stationary phase cultures were pelleted, and the supernatant containing the bacterial products was collected and filtered through a 0.22 μm filter. Gardnerella vaginalis (ATCC 14018) and Lactobacillus iners (ATCC 55195) were grown overnight at 37° C., 5% CO2 in NYCIII media with 10% horse serum. The following day, overnight cultures were back diluted to 0.1 OD600 in NYCIII with 2% horse serum for G. vaginalis and NYCIII with 10% horse serum for L. iners. 200 μL of back diluted cultures were then seeded in 96 well plates and incubated for 24 hours at 37° C., 5% CO2. After incubation, media was removed and fresh media containing 10% spent media from selected bacterial strains was added in 200 μL. Treatments were performed in quadruplicate with matching media controls. Plates were then incubated for 24 hours at 37° C., 5% CO2. After incubation, the media was removed, and the biofilms were washed three times with 200 μL PBS. After the last wash, all liquid was removed from the well and the biofilms were stained with 200 μL of 0.1% w/v crystal violet solution for 3 minutes at room temperature. The crystal violet solution was removed, and the wells were washed 3 times with 200 μL PBS. After washing, all liquid was removed from the wells and the stained biofilms were left to air dry at room temperature for 30 minutes. The stained biofilms were then solubilized with 200 μL of 95% ethanol. Absorbance at 570 nm was measured with a plate reader. Biofilm Remaining Ratio was calculated by taking the ratio of the average absorbance of treatment wells versus media control wells.

[0380] The effect of the conditioned media comprising the bacterial products from the selected bacterial strains on G. vaginalis and L. iners biofilm formation were represented as Biofilm Remaining Ratio values. These values were aggregated into a cluster map, an example of which shows various selected bacterial strains in FIG. 19 and TABLE 8. Condition media from individual strains had diverse effects on biofilm formation, clustering into different groups. One group of strains, including ST34, inhibit G. vaginalis biofilm formation by ˜60%, but increased L. iners biofilm formation by ˜100%. Another group of strains, including ST18, had no effect on either G. vaginalis or L. iners biofilm formation. Another group of strains, including ST20 (DSM34527), was capable of inhibiting G. vaginalis biofilm by 40% and did not exacerbate L. iners biofilm formation. These data were used to identify the candidate bacterial strains for the collective microbial consortium for treating or preventing BV, such as those described in TABLE 8.

[0381] As an illustrative example, the candidate bacterial strains could inhibit biofilm formation of G. vaginalis by 30% and prevent the expansion of L. iners biofilms by 20% relative to media control.

### Acidic pH Tolerance

[0382] Candidate bacterial strains should have a sufficient ability in growing in vaginal pH, which is acidic.

[0383] The ability of the selected bacterial strains to grow in acidic pH was measured using methods described in this EXAMPLE 2 or EXAMPLE 6, except that the tested and control condition is modified to be a medium with pH=4 and pH=6, respectively. The ability of the selected strain to grow in acidic pH was measured as the growth ratio of the bacterial strain between (1) media with pH=4 and (2) media with pH=6.

[0384] The result of the selected bacterial strains for growing in acid pH is summarized in TABLE 8. As an illustrative example, the candidate bacterial strains could generate at least about 650 μM hydrogen peroxide and about 1×10\hat{ }5 RLU of lactic acid when measured by the method described herein. While certain strains did not grow in acid pH significantly (such as ST77 or ST20), these strains could still be used in the collective microbial consortium as described herein when combined with the other candidate bacterial strains. In an illustrative example, the candidate bacterial strains had at least 30% growth ratio in media with pH=4/pH=6.

### Generations of Bacterial Products Relevant to BV

[0385] Candidate bacterial strains should have a sufficient ability to generate a bacterial product that can treat BV or alleviate the symptoms of BV. For example, the bacterial products can inhibit the growth of the BV pathogens. The bacterial products can comprise lactic acid or hydrogen peroxide (H₂O₂).

[0386] The ability of selected bacterial strains to generate lactic acids and hydrogen peroxide was assessed as follows: The hydrogen peroxide assay was performed as follows, in triplicate for each selected bacterial strain, using the Promega ROS-Glo hydrogen peroxide Assay Kit (Promega #G8820). Lactobacillus strains were grown anaerobically to stationary phase in vMRS and diluted to an OD600 of 0.3 in resuspension buffer (1×PBS+10 mM glucose+100 mM Tris-HCl pH 8). Cells were pelleted, supernatant removed, and resuspended in 1 mL resuspension buffer. 200 μL of each resuspended sample was incubated aerobically at 37° C., shaking at 100 rpm for 10 minutes to generate hydrogen peroxide. Cells were then pelleted and 10 μL of supernatant moved to opaque 96-well reaction plates containing 70 μL resuspension buffer per well. 20 μL of hydrogen peroxide Substrate solution (12.5 μL of 10 mM hydrogen peroxide Substrate per 1 mL Substrate Dilution Buffer, Promega #G8820) was added and plates incubated for 60 min at room temperature. 100 μL of ROS-Glo Detection Solution (1 mL Luciferin Detection Reagent, 10 μL D-Cysteine, 10 μL signal enchancer solution, Promega #G8820) was added, plates incubated for 20 minutes at room temperature, and luminesce read using a luminometer (and converted to molar concentration of hydrogen peroxide). The Lactic acid assay was performed as follows, in triplicate for each selected bacterial strain, using the Promega Lactate-Glo Assay Kit (J5021) with D-Lactic Dehydrogenase (Sigma, #L3888-500UN) and Sodium D-lactate (Sigma, #71716-1G) purchased separately to quantify D-Lactic acid. Supernatants from Lactobacillus strains grown to stationary phase were diluted 200× in PBS and 50 μL transferred to opaque 96-well reaction plates (separate 96-well plates for L and D-lactate). Lactate Detection Reagent was prepared for both L- and D-lactate (per reaction: 50 μL Luciferin Detection Solution, 0.25 μl Reductase, 0.25 μl Reductase Substrate, 0.25 μl Lactate Dehydrogenase, 0.25 μl NAD, Promega #J5021), and 50 μL of the Lactate Detection Reagent was added to each well. The plates were shaken for 1 minute to mix, incubated for 1 hour at room temperature, and luminesce read using a luminometer (measured as relative light unit/RLU).

[0387] The results of the selected bacterial strains for generating lactic acids and hydrogen peroxide are summarized in TABLE 8. As an illustrative example, the candidate bacterial strains could generate at least about 650 μM hydrogen peroxide and about 1×10\hat{ }5 RLU of lactic acid when measured by the method described herein.

[0388] Collectively, the candidate bacterial strains for collective microbial consortium for treating or preventing BV in the illustrative example showed sufficient ability to: adhere to VEC, utilize vaginally relevant carbohydrate, and/or inhibit vaginal pathogen growth/biofilm formation. Some of the exemplary strains are described in TABLE 8.

### Example 3: NEC-Specific Mode-Of-Actions (MOAs) and Functionality Assays

[0389] Provided herein are methods for determining NEC-specific MOAs and functionality for identifying candidate bacterial strains for generating collective microbial consortium for treating or preventing NEC.

[0390] Candidate bacterial strains were subjected to at least one of the following assays: (1) intestinal epithelial cell (IEC) adhesion assay; (2) Infant-relevant carbohydrate utilization; (3) NEC-pathogen inhibition; (4) TLR4 Receptor Inhibition; and (5) gastrointestinal barrier integrity. The selected bacterial strains had sufficient ability to: adhere to IEC, utilize infant-relevant carbohydrate, inhibit TLR4 receptor, inhibit NEC-pathogen growth and/or increase gastrointestinal barrier integrity.

### IEC Adhesion Assay

[0391] Selected bacterial strains are identified as having sufficient ability to adhere to the intestinal epithelial cells (IECs). Such ability can indicate that strain can show long-terms engraftments in the intestinal tract of the patients or subjects being administered with a collective microbial consortium comprising the strains. Strains that can adhere to IECs with a greater affinity than 1) the opportunistic pathogen strain E. coli; or 2) the comparator strains BG49 (Lactobacillus) or EV27 (Bifidobacterium) are identified as candidate bacterial strains for collective microbial consortium for treating or preventing NEC.

[0392] In intestinal epithelia cell adhesion assay, selected bacterial strains were individually tested for adherence to the IECs. The IECs (C2BBe1; ATCC, CRL-2102) were cultured in sterilized Biosafety cabinet (BSC) in complete media (DMEM (Gibco 11995) with 10% FBS and 1% Penicillin and Streptomycin (Gibco 15140-122)) at 37° C. in an atmosphere of 5% CO2. The IECs were digested with 0.25% trypsin-EDTA for 5 mins before the addition of complete media (for the T75 flask, use 2 mL of trypsin and 8 mL of complete media). The IECs were counted before being centrifuged at 2,700×g for 10 min, the media removed, and adjusted to a concentration to 1.0×10\hat{ }5 cells/mL in complete media (without Penicillin and Streptomycin). The IEC suspension was aliquoted into individual wells of a 6-well-culture plate (2 mL/well) and incubated at 37° C. in an atmosphere of 5% CO2 for 18 hours. After the incubation, the cells were washed with complete media (without Penicillin and Streptomycin), and the cells were co-incubated with the selected bacteria.

[0393] The selected bacterial strains were cultured in vegan media (in-house recipes) for overnight in the anaerobic chamber incubator at 37° C. The bacteria were then pelleted and resuspended in 5 mL of PBS for washing at least twice. The bacteria were then resuspended in DMEM (5 mL/culture; Gibco 11995).

[0394] 1 mL of bacterial cell suspension was added to each well of 6-well-culture plates with monolayer of IECs, and the mixture of cells were incubated for 1 hour at 37° C. in an atmosphere of 50 CO2. The mixture was then washed at least 5 times with PBS to remove non-adhering bacteria. At the last wash, the mixture was vigorously pipetted 20 times as a final wash. PBS was then removed, and 1 mL of 0.25% trypsin-EDTA was added to each culture and incubated for 15 minutes at 37° C. in an atmosphere of 5% CO2. The detached cells were gently resuspended before plating on to YFAP or MRS plates (as appropriate) with 10\hat{ }-1 to 10\hat{ }-7 dilutions. The number of bacterial cells adhered to the IECs was measured and plotted as the log [CFU of bacteria/9.5 cm\hat{ }2 IEC].

[0395] The summary of the result is shown in TABLE 11-1 and TABLE 11-2.

TABLE 11-1
First summary of NEC-specific MOA and functionality
assays for exemplary strains and control

| | | Top | Pathobiont | E. coli | TLR4 |
|---|---|---|---|---|---|
| | IEC | Carbohydrate | growth | growth | inhibition |
| Strain ID | adherence | utilization | inhibition* | inhibition (%) | (%) |
| ST19 | 1.2 log 4 | FOS, Galactose, | Tier 1 | 65 | 5 |
| | | Maltodextrin | | | |
| ST23 | 1.8 log 6 | FOS, GlcNAc, | Tier 1 | 71 | 12 |
| | | Mannose | | | |
| ST24 | not tested | FOS, Inulin, | Tier 1 | 99 | 13 |
| | | Maltodextrin, | | | |
| | | Galactose | | | |
| ST27 | 1.0 log 7 | FOS, Galactose, | Tier 1 | 68 | 0 |
| | | Maltodextrin | | | |
| ST31 | 1.6 log 7 | 2FL, LNnT, | Tier 1 | 7 | 6 |
| | | GlcNAc | | | |
| ST34 | 4.3 log 5 | not tested | Tier 1 | 63 | 0 |
| ST37 | 7.3 log 4 | FOS, 2FL, | Tier 1 | 76 | 0 |
| | | Maltodextrin | | | |
| ST51 | 2.8 log 4 | not tested | Tier 1 | 73 | 0 |
| ST56 | 1.0 log 5 | FOS | Tier 1 | | 1 |
| ST61 | 2.6 log 4 | FOS, Inulin, | Tier 1 | 90 | 16 |
| | | Maltodextrin | | | |
| ST65 | 5.9 log 6 | FOS, GlcNAc, | Tier 1 | 91 | 20 |
| | | Mannose | | | |
| ST66 | 1.1 log 5 | FOS, | Tier 1 | 98 | 6 |
| | | Maltodextrin | | | |
| ST71 | 1.4 log 5 | FOS | Tier 1 | 86 | 18 |
| ST80 | 1.9 log 7 | 2FL, Galactose | Tier 2 | 17 | 3 |
| ST81 | 2.9 log 4 | FOS, Galactose | Tier 1 | 82 | 13 |
| ST96 | 9.1 log 4 | FOS, Galactose, | Tier 1 | 85 | −20 |
| | | Maltodextrin | | | |
| ST101 | 3.3 log 4 | FOS, Inulin, | Tier 1 | 78 | 16 |
| | | Maltodextrin, | | | |
| | | Galactose | | | |
| ST102 | 2.1 log 6 | FOS, Mucin, | Tier 1 | 68 | 12 |
| | | Maltodextrin | | | |
| ST116 | 1.6 log 5 | GlcNAc, | Tier 1 | 37 | 0 |
| | | Mannose, | | | |
| | | Galactose | | | |
| ST119 | 3.6 log 5 | Galactose, | Tier 2 | 89 | 14 |
| | | 2FL, FOS | | | |
| L. reuteri BG49 | 9.1 log 5 | Galactose | not tested | 51 | 0 |
| B. longum EV27 | 6.2 log 4 | FOS, 2FL, | Tier 2 | 80 | 0 |
| | | LNnT, Galactose | | | |
| E. coli | 1.0 log 6 | N/A | N/A | N/A | −40 |
| notes | (log 10 [CFU/ | *all use | 4 Tiers | in glucose | in glucose |
| | 9.5 cm\hat{ }2]) | Lactose | | rich media | rich media |

*Tier 1 bacterial strains inhibited the growth of all 6 pathogens and at least 2 of these pathogens were inhibited by greater than 50%. Tier 2 bacterial strains inhibited the growth of at least 4 pathogens, and the inhibition of these pathogens was less than 50%. Tier 3 bacterial strains inhibited the growth of at least 3 pathogens but promoted the growth of at least 1 pathogen. Tier 4 bacterial strains promoted the growth of at least 3 pathogens.
N/A: not applicable

TABLE 11-2
Second summary of NEC-specific MOA and functionality
assays for exemplary strains and control

| | | | | E. coli | |
|---|---|---|---|---|---|
| | Growth in 50% | Growth in 50% | Barrier | growth | TLR4 |
| | BMWL (% | milk FWL (% | function (% | inhibition | inhibition |
| | relative to | relative to | relative to | (%) when | (%) when |
| | glucose | glucose | media | grown in | grown in |
| Strain ID | media) | media) | control) | BMWL | BMWL |
| ST19 | 94 | 110 | not tested | 89 | not tested |
| ST23 | 123 | 103 | 120 | 86 | 94 |
| ST24 | 119 | 88 | not tested | not tested | not tested |
| ST27 | not tested | not tested | 99 | not tested | not tested |
| ST31 | 269 | 177 | 89 | 85 | 51 |
| ST34 | 80 | 94 | not tested | not tested | not tested |
| ST37 | 96 | 101 | 120 | 90 | 93 |
| ST51 | 79 | 94 | not tested | not tested | not tested |
| ST56 | | | not tested | not tested | not tested |
| ST61 | 174 | 118 | 112 | not tested | not tested |
| ST65 | 115 | 96 | 112 | 98 | 26 |
| ST66 | 105 | 114 | 128 | not tested | not tested |
| ST71 | 146 | 138 | 113 | 89 | 70 |
| ST80 | 59 | 124 | 115 | 10 | 0 |
| ST81 | 130 | 108 | 107 | 92 | 92 |
| ST96 | 138 | 207 | 130 | not tested | not tested |
| ST101 | 151 | 160 | 123 | 90 | 98 |
| ST102 | 114 | 106 | not tested | 91 | 53 |
| ST116 | 122 | 112 | 99 | 96 | 90 |
| ST119 | 95 | 94 | 115 | 87 | 97 |
| L. reuteri BG49 | 86 | 111 | not tested | not tested | not tested |
| B. longum EV27 | 175 | 154 | not tested | not tested | not tested |
| E. coli | N/A | N/A | N/A | N/A | N/A |
| notes | breast milk | milk formula | 40 h | 50% BMWL | 50% BMWL |
| | whey liquid | whey liquid | impedance | media | media |

N/A: not applicable

[0396] As an illustrative example, the, candidate bacterial strains for the collective consortia for treating or preventing NEC had at least about 1×10\hat{ }7 [CFU of bacteria/9.5 cm\hat{ }2 IEC's plasma membrane], adhere to IECs with an affinity 10× greater than that of E. coli or the comparator strain BG49 and 100× greater than the comparator strain EV27. The lowest percentile of bacteria, which had at least about 1×10\hat{ }4 [CFU of bacteria/9.5 cm\hat{ }2 IEC's plasma membrane], adhere to IECs at least as well as the comparator strain EV27. These selected bacterial strains were identified as candidate bacterial strains for collective microbial consortium for treating or preventing NEC.

### Infant Relevant Carbohydrate Utilization

[0397] selected bacterial strains are identified as having the ability to utilize 1) lactose (the major carbohydrates present in human breast milk or milk formula products) as a sole carbon source and 2) at least one other carbohydrate predicted to be present in the intestinal tract. Such abilities can indicate that strain can show long-terms engraftments in the intestinal tract of the patients or subjects being administered with a collective microbial consortium comprising the strains. An ability to utilize a unique carbohydrate can allow a selected strain to establish a niche within the intestinal tract of the patient or subject by providing a competitive nutrient advantage.

[0398] Strains were evaluated on their ability to utilize a carbohydrate as a sole carbon source by measuring their growth rate in media containing the carbohydrate as the sole carbohydrate source and determining the growth ratio relative to the strain's growth in the same media containing glucose. selected bacterial strains that could utilize lactose and at least one other unique carbohydrate source to grow to a cell density equal to ˜70% of the growth observed in glucose media were identified as candidate bacterial strains for the collective microbial consortium for treating or preventing NEC. Additional selection criteria of the candidate bacterial strain can comprise those that could also utilize additional carbohydrates to grow to a biomass equal to or greater than 50% of that in glucose. Candidate bacterial strains were additionally selected for use in a collective microbial consortium that did not share 100% similarities in carbohydrate utilization profiles.

[0399] Provided herein are methods for the preparation and execution of direct carbohydrate utilization screening for the purpose of screening selected bacterial isolates for their ability to utilize carbohydrates and growth factors that may promote host colonization and therapeutic efficiency. Such strains may be used as part of a collective microbial consortium described herein. FIG. 2 illustrates the overall direct carbohydrate utilization screening method.

### 1. Preparation of the Carbohydrate Stock Solutions

[0400] Generally, the procedures for preparing carbohydrate stock solutions as described herein can be used for culturing and screening obligatory and facultative anaerobic bacterial strains. The exemplary bacterial strains in this example were derived from a human fecal, vaginal, or gastrointestinal sample and were grown on selective media.

[0401] First, the carbohydrate stock solutions were prepared by dissolving each carbohydrate listed in TABLE 6, excluding mucin, guar gum, pectin, and inulin, in Milli-Q water to create a 20% carbohydrate solution, 10× the Final Concentration percentage listed in TABLE 6. Mucin, guar gum, pectin, and inulin were not dissolved in Milli-Q water.

[0402] selected bacterial strains were subjected to at least three assays: (1) intestinal epithelial cell (IEC) adhesion assay; (2) Infant-relevant carbohydrate utilization; (3) NEC-pathogen inhibition; (4) TLR4 Receptor Inhibition; and (5) barrier integrity.

TABLE 6
Carbohydrate Compound Library.

| | | Catalog | | Final % |
|---|---|---|---|---|
| Carbohydrate | Vendor | Number | Category | Concentration |
| 2FL | DSM | 5016552174 | HMO | 2 |
| LNnT | DSM | 5016561174 | HMO | 2 |
| Mucin | Sigma | M1778-100G | Host | 0.3 |
| Galactooligosaccharides | Carbosynth | OG32134 | oligosaccharides | 2 |
| (GOS) | | | | |
| Fructooligosaccharide | Carbosynth | OF05207 | oligosaccharides | 2 |
| (FOS) | | | | |
| D-Lactose monohydrate | Sigma | 61339-25G | disaccharide | 2 |
| L-Fucose | Carbosynth | MF06710 | deoxy sugar | 2 |
| N-Acetylneuraminic acid | Carbosynth | MA00746 | deoxysugar | 2 |
| (Sialic Acid) | | | | |
| N-Acteyl Glucosamine | Sigma | A3286-100G | amino sugar | 2 |
| D-Mannose | Carbosynth | MM06704 | monosaccharide | 2 |
| D-Galactose | Carbosynth | MG05201 | monosaccharide | 2 |
| D-Fructose | Carbosynth | MF00781 | monosaccharide | 2 |
| Inulin | Sigma | I2255 | prebiotic | 0.3 |
| polydextrose | Carbosynth | YP29207 | prebiotic | 2 |
| maltodextrin | Spectrum | M1083 | prebiotic | 2 |
| pectin | Hoosier Hill | Hoosier Hill Fruit | prebiotic | 0.3 |
| | Farms | Pectin, 2 Lb | | |
| Guar gum | Bob's Red | Bob's Red Mill Guar | prebiotic | 0.05 |
| | Mill | Gum, 08 Oz | | |
| Corn Syrup | Golden | Golden Barrel Corn | prebiotic | 2 |
| | Barrel | Syrup (32 fl. oz.) | | |
| D-Glucose | Sigma | G7021 | monosaccharide | 2 |

[0403] Excluding mucin, guar gum, pectin, and inulin, the 10× carbohydrate stock solutions were filtered through a sterile 0.22 μm PES syringe filter (Millipore). Mucin, guar gum, pectin, and inulin were dissolved in water and autoclaved to attain sterility.

### 2. Stock Carbohydrate Plates Preparation

[0404] The stock carbohydrate plates were prepared by aliquoting 20 μL of each 10× carbohydrate stock solution individually into each well of the plate in a biosafety cabinet, as diagrammed in FIG. 3. Stock carbohydrate solutions were added into all wells except F1-3 and H9, into which water was pipetted. Rows G and H were media and carbohydrate stock solution sterile controls. Bacteria culture was pipetted into the wells in rows A-F. The bottom rows of the plate, row G and H, are negative media controls to evaluate media sterility. Upon completion of stock carbohydrate plate preparation, the plates were wrapped in a seal of parafilm and frozen at −20° C.

### 3. Inoculum and Culture

[0405] First, the frozen stock carbohydrate plates were prepared for inoculation by being defrosted, centrifuged at 400 rpm for 1 minute, and placed in an anaerobic chamber for one hour before use.

[0406] The previously isolated bacterial strains Bifidobacteria and Lactobacillus were cultured overnight in complete media with glucose. A 1:100 dilution of the Bifidobacteria and Lactobacilli cultures were prepared in a basal media without carbohydrates (TABLEs 3-4).

[0407] After dilution, 180 μL of the diluted bacterial strain was pipetted into each well of row A, row B, row C, row D, row E, and row F of the defrosted and anaerobically stored stock carbohydrate plates as diagrammed in FIG. 3. For the sterile media controls, 180 μL of basal media (TABLEs 3-4) were pipetted into each well of row G and row H as diagrammed in FIG. 3.

[0408] The OD₆₀₀ spectrophotometer measurement of each well of the stock carbohydrate plates was taken every 30 minutes for a 24-hour time period.

[0409] The summary of the result is shown in TABLEs 11-1 and 11-2. All strains could utilize lactose as a sole carbohydrate source. As an illustrative example, the top 20 percentile of strains that were tested could also utilize at least one other infant-relevant carbohydrate source that was expected to be abundant in human breast milk or infant milk formula (such as 2FL, LNnT). Candidate bacterial strains for collective microbial consortium for treating or preventing NEC could utilize lactose and at least 2 of these other infant-relevant carbohydrates to grow to a biomass equal to or greater than 70% of that in glucose. Many of these strains could also utilize additional carbohydrates to grow to a biomass equal to or greater than 50% of that in glucose.

### NEC-Pathogen Growth Inhibition

[0410] Candidate bacterial strains for collective microbial consortium for the treatment and prevention of NEC are identified as having the ability to inhibit NEC pathogen growth.

[0411] Methods for determining the inhibitions are outlined in EXAMPLE 11.

[0412] The summary of the result is shown in TABLEs 11-1 and 11-2. Most of the candidate strains could inhibit the growth of E. coli by more than 70%.

### TLR4 Receptor Inhibition

[0413] Candidate bacterial strains can be identified having sufficient ability to inhibit innate immune response (such as TLR4) activation if culture supernatants from their growth can reduce LPS-stimulated TLR4 activation by at least 50%. Such an ability can indicate that strain can provide protection against an over-reactive and inappropriate innate immune response. Such an immune response often precedes overt NEC disease onset.

[0414] Strains were compared against 1) a commercially available TLR antagonist (LPS purified from R. sphaeroides) available from Invivogen (tlrl-rslps) and 2) the comparator strains BG49 (Lactobacillus) or EV27 (Bifidobacterium), which are single strain products of other companies.

[0415] In the TLR4 receptor inhibition assay, the LPS used for activation of TLR4 was purified from gastrointestinal pathogen (such as E. coli and is commercially available from Invivogen (tlrl-b5lps)) The. selected bacterial strains were individually tested for their ability to inhibit LPS-stimulated TLR4 activation. HEK-Blue™ hTLR4 cells having the SEAP reporter (Invivogen, hkb-htlr4) were cultured in a sterilized Biosafety cabinet (BSC) in complete media (DMEM (Gibco 11995) with 10% FBS, 1% Penicillin and Streptomycin (Gibco 15140-122), 1% Normocin, and 1% HEK-Blue™ Selection) at 37° C. in an atmosphere of 5% CO². The HEK-Blue™ hTLR4 cells were incubated in pre-warmed sterile PBS for 5 mins before being pipet mixed and transferred to a 15 mL tube (for the T175 flask, use 10 mL of PBS). The cells were counted and diluted in treatment media (DMEM (Gibco 11995) with 10% heat-inactivated FBS, 1% Penicillin and Streptomycin (Gibco 15140-122)) to a concentration of 138,889 cells per mL and then seeded into a 96-well plate at a concentration of 25,000 cells per well and incubated at 37° C. in an atmosphere of 5% CO².

[0416] Next, culture supernatants were prepared from each selected strain for testing—each supernatant was diluted to 80% in treatment media (60 uL supernatant and 15 uL treatment media). Each mix was vortexed and 10 uL were added to each of 4 replicate wells in the 96-well plate. The plate was incubated for 5-h before the addition of LPS. LPS was added to a final concentration of 0.1 ng/mL (10 uL of 2 ng/mL stock prepared in treatment media). Media controls, with and without LPS addition, were included on each plate for signal normalization. Once LPS was added, the 96-well plate containing the treated HEK-Blue™ hTLR4 cells was incubated at 37° C. in an atmosphere of 5% CO² for 18-h. After 18-h, 10 uL of supernatant was collected from each well into a new 96-well plate and added with 90 μL of HEK-Blue™ Detection media for 4 hours protected from light at room temperature for determining TLR4 activation. TLR4 activation is determined by reading the colorimetric absorbance at 630 nm on a standard plate reader.

[0417] The summary of the result is shown in TABLE 11. No individual strain grown in glucose rich culture media was able to generate supernatant that could inhibit LPS-stimulated TLR4 activation. Thus, all the selected strains were used as potential candidate strains in a collective consortium for to test for their ability to inhibit TLR4 activation.

### Barrier Integrity

[0418] Candidate bacterial strains for the collective microbial consortium for the treatment and prevention of NEC should be able to maintain or improve intestinal barrier integrity, in some cases, via extracellular products.

[0419] The ability of bacterial strains to affect epithelial barrier integrity in vitro was assessed using an impedance-based real-time cell monitoring system. The conditioned media were from selected bacterial strains were harvested as previously described (see EXAMPLES 3 or 7). The cellular impedance of c2BBe1 intestinal epithelial cells was measured using the xCELLigence Real-Time Cell Analysis system (Agilent) as follows. Baseline impedance measurements were recorded by adding 50 μl of cell culture media (DMEM w/ 10% FBS+30 mM HEPES) to a 96-well E plate (PET). The plate was loaded in an xCELLigence MP cradle housed in a tissue culture incubator at 37° C., 5% CO₂, and baseline impedance was measured. After the measurements, the plate was removed from the cradle, and each well was seeded with 49,000 cells/well in 50 μl of cell culture media. After seeding the plate, it was incubated under normal atmospheric conditions at room temperature for 30 minutes. The plate was then loaded in the MP cradle and incubated for hour with impedance measurements recorded every 15 minutes. In a separate 96-well plate, treatments of bacterial products from select strains were prepared. In triplicate, 22 μl of media controls or bacterial products were mixed with 88 μl of cell culture media. 100 μl of this mixture was then added to the E plate, which was loaded back into the MP cradle. The plate was incubated for 72 hours with measurements recorded every 5 minutes. Data were analyzed by normalizing the Cell Index (cellular impedance) to the time of treatment addition. The average Normalized Cell Index was plotted for the entire time course of the experiment. Intestinal epithelial barrier integrity was assessed in 2 ways: as the cellular impedance achieved after 40 hours of treatment (when the cellular impedance reached a steady state plateau) and as the area under the curve of the average Normalized Cell Index line.

[0420] The effect of extracellular bacterial products on intestinal epithelial barrier formation in vitro are represented as the change in the Cell Index over time, normalized to the time of treatment addition. Extracellular bacterial products from individual strains did not increase the rate at which cellular impedance increased but did affect the maximum cellular impedance achieved. Quantification of the 40-hour cellular impedance between treatment and control conditions are shown in TABLE 11. Extracellular bacterial products from individual strains had diverse effects on the maximum cellular impedance of the c2BBe1 intestinal epithelial cells, ranging from 89-130% of the media control. Some strains had no effect on epithelial barrier formation, such as ST27, ST81, and ST116. Other strains increased the maximum cellular impedance greater than 20% (relative to a media-only control), such as ST23, ST37, ST66, ST96, and ST101. None of the extracellular bacterial products tested drastically decreased intestinal epithelial barrier formation. The candidate bacterial strains that could improve barrier function by at least 10% over the control, as measured by increased cellular impedance after 40 hours of treatment or by an increase in the area under the curve calculated from recording cellular impedance over time, were identified as candidate bacterial strains.

[0421] Collectively, the candidate strains for collective microbial consortium for treating or preventing NEC showed sufficient ability to: The selected bacterial strains had sufficient ability to: adhere to IEC, utilize infant-relevant carbohydrate, inhibit NEC-pathogen growth, and increase gastrointestinal barrier integrity.

### Example 4: Collective BV- or NEC-Specific Functionality Assays

[0422] Provided herein are methods for evaluating collective effects of individual selected microbial strains within a collective microbial consortium.

[0423] Individual candidate bacterial strains were first evaluated for having the ability to be a donor or recipient strains when combined with other candidate bacterial strains, such as modified using the methods described in EXAMPLEs 7-8. the identified donor and recipient strains were then subjected to disease specific assays to identify collective microbial consortium, such as using the methods of this EXAMPLE or modified from those described herein (such as in EXAMPLEs 2-3, 6, 8, and 10-11).

[0424] FIG. 20 depicts a cartoon schematic of the method for evaluating collective effects of individual candidate microbial strains within a collective microbial consortium. In process 2001, a donor bacterial strain is inoculated in a culture medium for 24-36 hours. In process 2002, the cell-free supernatant of the donor bacterial culture is harvested from the donor bacterial culture by pelleting and removing the donor bacterial cells from the cultured medium. Cell-free supernatants are further filtered using a 0.2 um filter to remove cells and cellular debris. Optionally, 9 parts of the supernatant of the donor bacterial culture and 1 part of 10× growth media without a sugar source are mixed and use to inoculate a recipient bacterial strain for about 24 hours. In process 2003, the cell-free supernatant of the recipient bacterial culture is harvested from the recipient bacterial culture by pelleting and removing the recipient bacterial cells from the cultured medium. In process 2004, the cell-free of the recipient bacterial culture is used to test for various diseases-specific functionality/assays, such as those described herein, including those described in this example (e.g., growth, pathogen-inhibition, and/or immune response reporter) or those modified from EXAMPLEs 2-3, 6, 8, and 10-11.

### Vaginal Pathogen Inhibition

[0425] Methods for determining the inhibitions are outlined in EXAMPLE 2. Supernatants of all strains of interest were used at a final dilution of 1/10 in the assay.

[0426] The result of the exemplary consortium is summarized in TABLE 12. For example, most collective consortium, such as those comprising ST105 or ST21, inhibited the growth of BV pathogen significantly better than those of the individual strain when cultured alone (i.e., without the conditioned medium) or controls (see a comparison of TABLEs 8 and 11), suggesting these collective consortia could be more effective in treating or preventing BV compared to the individual bacterial strain.

TABLE 12
Summary of BV-specific MOA and functionality assays
for exemplary collective combinations and control

| | % Growth between (1) ST100 | G. vaginalis Biofilm Inhibition |
|---|---|---|
| | conditioned medium with | (% Reduction) when grown on |
| | carbon source as glucose | ST100 conditioned medium with |
| Bacterial strain(s) | and (2) MRS medium | carbon source as glucose |
| L. jensenii ST21 | 68% | 47% |
| L. gasseri ST105 | 69% | 50% |
| L. crispatus ST20 | 0% | 6% |
| L. crispatus ST43 | 0% | 13% |
| L. crispatus ST92 | 7% | 13% |
| L. jensenii ST21 + | N/A | 55% |
| L. gasseri ST105 | | |
| L. crispatus ST20, | N/A | 54% |
| L. jensenii ST21, | | |
| L. gasseri ST105 | | |
| L. crispatus ST20, | N/A | 13% |
| L. crispatus ST43, | | |
| L. crispatus ST92 | | |

N/A: not applicable

### NEC Pathogen Inhibition

[0427] Candidate bacterial strains for collective microbial consortium for the treatment and prevention of NEC can inhibit the growth of NEC pathogen (such as E. coli) by at least 5%. As an illustrative example, the candidate bacterial strains can inhibit the growth of E. coli by at least 20% compared to the media control.

[0428] Methods for determining the inhibitions are outlined in EXAMPLEs 3 and 11. Supernatants of all strains of interest were used at a final dilution of 1/10 in the assay.

[0429] The effect of the conditioned media comprising the extracellular products from the selected bacterial strains on planktonic growth of NEC pathogens as Pathogen Growth Ratio values. These values were aggregated into a cluster map, an example of which shows various selected bacterial strains in FIG. 21 and TABLE 13.

TABLE 13
Summary of NEC-specific MOA and functionality assays
for exemplary collective combinations and control

| | Growth ratio (%) between | TLR4 inhibition | Barrier function |
|---|---|---|---|
| | (1) ST31 conditioned | with cultured | with cultured |
| | medium with carbon source | in ST31 | in ST31 |
| | as glucose and (2) non- | conditioned | conditioned |
| Bacterial | nonconditioned medium with | medium (% | medium (% over |
| strains | carbon source as glucose | inhibition) | control AUC) |
| ST19 | not tested | not tested | not tested |
| ST23 | 70 | 61 | 109 |
| ST24 | not tested | not tested | not tested |
| ST27 | 70 | 25 | 137 |
| ST31 | N/A | N/A | N/A |
| ST34 | 90 | not tested | not tested |
| ST37 | not tested | not tested | 97 |
| ST51 | 85 | not tested | not tested |
| ST56 | not tested | not tested | not tested |
| ST61 | 80 | 79 | 143 |
| ST65 | 85 | not tested | not tested |
| ST66 | 75 | 86 | 105 |
| ST71 | not tested | 46 | 132 |
| ST80 | not tested | 0 | 127 |
| ST81 | 75 | 89 | 150 |
| ST96 | not tested | not tested | 140 |
| ST101 | 75 | 75 | 152 |
| ST102 | not tested | not tested | not tested |
| ST116 | 80 | not tested | not tested |
| ST119 | not tested | 94 | 145 |
| L. reuteri BG49 | N/A | N/A | N/A |
| B. longum EV27 | N/A | N/A | N/A |
| E. coli | N/A | N/A | N/A |
| notes | ST31 grown in | ST31 grown in | ST31 grown in |
| | 2FL or LNnT | glucose | glucose |

N/A: not applicable

[0430] Condition media from individual strains had diverse effects on the planktonic growth of NEC-associated pathogens, clustering into different groups. One group of strains, including ST23, inhibits the growth of 5 out of 6 pathogens by at least 30%. Another group of strains, including ST119, inhibited the growth of 3 out of 6 pathogens by 20%. Another group of strains, including ST57, promoted the growth of some pathogens by 30%. These data were used to identify the selected bacterial strains for the collective microbial consortium for treating or preventing NEC, such as those described in TABLE 13.

### TLR4 Receptor Inhibition

[0431] Methods for determining the inhibitions of the innate immune response activation are outlined in EXAMPLE 3. Supernatants of all strains of interest were used at a final dilution of 1/10 in the assay.

[0432] The result is summarized in TABLE 13. While no individual strain grown in glucose rich culture media was able to generate supernatant that could inhibit LPS-stimulated TLR4 activation (see EXAMPLE 3 or TABLE 11), when grown in the same media in which glucose was replaced with 50% breast milk whey liquid, 6 strains were identified whose supernatants could inhibit LPS-stimulated TLR4 activation by at least 50%. In addition, 7 strains were identified whose supernatants could inhibit LPS-stimulated TLR4 activation by at least 50% when cross-fed. The power of cross-feeding was apparent in the observation that the culture media used for cross-feeding experiments was the same glucose rich media used for growing individual strains. Thus, significant TLR4 inhibition functionality was discovered when one strain was grown in the presence of the bacterial products generated from another strain. As described herein, NEC is associated with activation of innate immune response (such as those regulated by TLR4). Candidate bacterial strains for collective microbial consortium for the treatment and prevention of NEC should inhibit the activation of TLR4 signaling by at least 1%.

### Barrier Integrity

[0433] While none of the extracellular bacterial products tested drastically decreased intestinal epithelial barrier formation (see EXAMPLE 3 or TABLE 11), these extracellular products from cross-fed strains increased the rate at which cellular impedance increased for the c2BBe1 intestinal epithelial cells, as shown by the increased areas under the curve described in TABLE 13. Strains such as ST61, ST81, ST96, ST101, and 119 were able to increase epithelial barrier formation by 40% or greater when cross-fed by ST31.

[0434] Collectively, the data showed that collective consortium could inhibit TLR4 activation or increase barrier significantly better than those of individual strains alone (i.e., without the conditioned medium) or controls (see a comparison of TABLEs 11-1/11-2 and 13), suggesting these collective consortia could be more effective in treating or preventing NEC compared to the individual bacterial strain.

### Example 5: Bacterial Strain Repository Culturing and Expansion

[0435] Provided herein are methods for the isolation and culturing of bacterial strains for screening and collective microbial consortium construction. Such strains may be used as part of a collective microbial consortium described herein.

[0436] Therapeutic bacterial selected bacterial strains in the genera Bifidobacterium and Lactobacillus were cultured from donor samples using vegan MRS media at pH 5.75 and pH 6.75, with and without the addition of L-cysteine. Using a sterile disposable spatula or loop, 10-20 mg of sample were transferred into 900 μL of sterile PBS-C, mixed, and serially diluted to 1E-10. Using a 1 mL pipette, 100 μL of dilutions 1E-8-1E-10 were added to MRS agar growth media (with or without cysteine) and spread across the agar plate in a circular fashion using a sterile disposable hockey stick spreader. Sealed plates were placed inverted (agar on top) in the 37° C. incubator for growth.

[0437] After 48-72 hours of growth, parafilm was gently removed from the exterior of the plates and the plates were arranged in order of increasing dilution. Plates with clearly isolated colonies were chosen for strain isolation. The goal was to isolate a diversity of strains by selecting isolated colonies that vary in morphology (size, shape, color, margin, etc.). Using a sterile loop, colonies of interest were selected and streaked for isolation using a 4-quadrant method. After 48 hours incubation at 37 C, isolated colonies were re-streaked on selective media for purification. This process was completed twice. After the second round of colony purification, the isolated colony was transferred to 15 mL of liquid culture media. After 24 hours, cultures were harvested and mixed with glycerol (final 15% concentration) and frozen at −80 C to generate research cell banks. Strain identification was accomplished through Sanger sequencing of the 16SrRNA gene using PCR amplicons generated from the 27F and 1492R primers.

[0438] The OD₆₀₀ of the culture was measured periodically and were plotted onto growth curves shown in FIG. 1. The selected media pH and cysteine content were determined by the growth curves for each strain of interest, results of which are shown in TABLE 2. For example, the growth curves demonstrate that L. jensenii exited the log phase and entered the stationary phase at about 15 hours post-inoculation, with an OD₆₀₀ of about 1.4. The growth curves also show that L. crispatus entered the stationary phase at less than about 4 hours with an OD₆₀₀ of about 0.11, and cell death began at about 22 hours post-inoculation.

TABLE 2
Strain Repository Expansion Media Preparation.

| | pH 5.75 | pH 5.75 + cys | pH 6.75 | pH 6.75 + cys |
|---|---|---|---|---|
| VST11 | X | X | — | X |
| (Frozen) | | | | |
| VST15 | X | X | — | L. crispatus |
| (Frozen) | | | | (1 isolate) |
| VST17 | X | X | — | X |
| (Frozen) | | | | |
| VST19 | L. crispatus | L. crispatus | X | X |
| VST22 | X | X | — | X |
| (Frozen) | | | | |
| VST23 | X | X | — | X |
| VST24 | L. crispatus | L. crispatus | — | X |
| VST25 | X | L. gasseri | X | X |
| VST26 | X | X | — | X |
| VST27 | X | L. crispatus | — | X |
| | | L. jensenii | | |
| VST28 | X | X | — | X |
| (Frozen) | | | | |
| VST31 | L. paracasei | L. paracasei | X | X |
| VST32 | L. fermentum | X | X | X |

[0439] Media of the pH and cysteine content (1 mM) shown in TABLE 2 were prepared for enrichment of bacterial isolates from the genera Bifidobacterium and Lactobacillus. The media were sterile filtered through a sterile 0.22 μm PES syringe filter (Millipore). The sterile media was then placed in an anaerobic chamber with a loose cap for 24 hours prior to use for inoculation.

[0440] The previously isolated bacterial strains Bifidobacteria and Lactobacilli were cultured overnight in complete MRS media with glucose at the pH indicated in TABLE 2.

[0441] The cultured bacterial strains of interest were isolated. Examples of an identified selection of these strains is summarized in TABLE 5.

TABLE 5
Vaginal Swab and Infant Stool Sample Isolations Summary.

| | | | | | | | Third | |
|---|---|---|---|---|---|---|---|---|
| | | | PCR & | Dominant | Other | Second | Round | |
| | Colony | Isolates | Sanger | Lactobacillus | Dominant | Round of | of | MCB |
| Samples | Morphology | Selected | Sequencing | Strains | Strains | Isolation | Isolation | Manufacture |
| 25 | Single- | 1221 | 642 | 25 unique | Enterococcus | 17 | 14 | 13 |
| | Multiple | | | Lactobacillus | faecalis | strains | strains | completed |
| | | | | strains | Escherichia | completed | completed | |
| | | | | L. crispatus (12 | fergusonii | | | |
| | | | | unique strains) | Escherichia | | | |
| | | | | L. jensenii (5 | coli | | | |
| | | | | unique strains) | | | | |
| | | | | L. gasseri (2 | | | | |
| | | | | unique strains) | | | | |
| | | | | L. fermentum (2 | | | | |
| | | | | unique strains) | | | | |
| | | | | L. Plantarum (1 | | | | |
| | | | | unique strain) | | | | |
| | | | | L. paracasei (1 | | | | |
| | | | | unique strain) | | | | |
| | | | | L. vaginalis (1 | | | | |
| | | | | unique strain) | | | | |
| | | | | Bifidobacterium | | | | |
| | | | | breve (1 unique | | | | |
| | | | | strain) | | | | |
| n/a | n/a | 1065 | 945 | B. longum (177) | n/a | n/a | n/a | 30 |
| | | | | B. fragilis (124) | | | | |
| | | | | B. bifidum (71) | | | | |
| | | | | E. ramosum (62) | | | | |
| | | | | B. | | | | |
| | | | | pseudocatenulatum | | | | |
| | | | | (50) | | | | |
| | | | | B. breve (31) | | | | |
| | | | | B. stercoris (28) | | | | |

### Example 6: Direct Carbohydrate Utilization Screening

[0442] Provided herein are methods for the preparation and execution of direct carbohydrate utilization screening for the purpose of screening selected bacterial isolates for their ability to utilize carbohydrates and growth factors that may promote host colonization and therapeutic efficiency. Such strains may be used as part of a microbial consortium described herein. FIG. 2 illustrates the overall direct carbohydrate utilization screening method.

### 1. Preparation of the Carbohydrate Stock Solutions

[0443] Generally, the procedures for preparing carbohydrate stock solutions as described herein can be used for culturing and screening obligatory and facultative anaerobic bacterial strains. The exemplary bacterial strains in this example were derived from a human fecal, vaginal, or gastrointestinal sample and were grown on selective media.

[0444] First, the carbohydrate stock solutions were prepared by dissolving each carbohydrate listed in TABLE 6, excluding mucin, guar gum, pectin, and inulin, in Milli-Q water to create a 20% carbohydrate solution, 10× the Final Concentration percentage listed in TABLE 6. Mucin, guar gum, pectin, and inulin were not dissolved in Milli-Q water.

TABLE 6
Carbohydrate Compound Library.

| | | Catalog | | Final % |
|---|---|---|---|---|
| Carbohydrate | Vendor | Number | Category | Concentration |
| 2FL | DSM | 5016552174 | HMO | 2 |
| LNnT | DSM | 5016561174 | HMO | 2 |
| Mucin | Sigma | M1778-100G | Host | 0.3 |
| Galactooligosaccharides | Carbosynth | OG32134 | oligosaccharides | 2 |
| (GOS) | | | | |
| Fructooligosaccharide | Carbosynth | OF05207 | oligosaccharides | 2 |
| (FOS) | | | | |
| D-Lactose monohydrate | Sigma | 61339-25G | disaccharide | 2 |
| L-Fucose | Carbosynth | MF06710 | deoxy sugar | 2 |
| N-Acetylneuraminic | Carbosynth | MA00746 | deoxysugar | 2 |
| acid (Sialic Acid) | | | | |
| N-Acteyl | Sigma | A3286-100G | amino sugar | 2 |
| Glucosamine | | | | |
| D-Mannose | Carbosynth | MM06704 | monosaccharide | 2 |
| D-Galactose | Carbosynth | MG05201 | monosaccharide | 2 |
| D-Fructose | Carbosynth | MF00781 | monosaccharide | 2 |
| Inulin | Sigma | I2255 | prebiotic | 0.3 |
| polydextrose | Carbosynth | YP29207 | prebiotic | 2 |
| maltodextrin | Spectrum | M1083 | prebiotic | 2 |
| pectin | Hoosier Hill | Hoosier Hill Fruit | prebiotic | 0.3 |
| | Farms | Pectin, 2 Lb | | |
| Guar gum | Bob's Red | Bob's Red Mill Guar | prebiotic | 0.05 |
| | Mill | Gum, 08 Oz | | |
| Corn Syrup | Golden | Golden Barrel Corn | prebiotic | 2 |
| | Barrel | Syrup (32 fl. oz.) | | |
| D-Glucose | Sigma | G7021 | monosaccharide | 2 |
| Maltose | ThermoFisher | A16266.22 | Glycogen | 2 |
| | | | metabolite | |
| Mucin | Sigma | M1778-100G | Host | 0.3 |
| Glycogen | Sigma | G0885-5G | Host | 2 |
| Melibiose | Sigma | M5500-5G | Disaccharide | 2 |
| N-Acetylneuraminic | Carbosynth | MA00746 | Deoxysugar | 2 |
| acid (Sialic Acid) | | | | |
| N-Acteyl | Sigma | A3286-100G | Amino sugar | 2 |
| Glucosamine | | | | |
| Maltodextrin | Spectrum | M1083 | Glycogen | 2 |
| | | | metabolite | |
| D-Glucose + | Sigma | G7021 | Monosaccharide | 2 |
| 0.1% cysteine | VWR | J994-100G | Amino acid | |
| | (cysteine) | (cysteine) | | |

[0445] Excluding mucin, guar gum, pectin, and inulin, the 10× carbohydrate stock solutions were filtered through a sterile 0.22 μm PES syringe filter (Millipore). Mucin, guar gum, pectin, and inulin were dissolved in water and autoclaved to attain sterility.

### 2. Stock Carbohydrate Plates Preparation

[0446] The stock carbohydrate plates were prepared by aliquoting 20 μL of each 10× carbohydrate stock solution individually into each well of the plate in a biosafety cabinet, as diagrammed in FIG. 3. Stock carbohydrate solutions were added into all wells except F1-3 and H9, into which water was pipetted. Rows G and H were media and carbohydrate stock solution sterile controls. Bacteria culture was pipetted into the wells in rows A-F. The bottom rows of the plate, row G and H, are negative media controls to evaluate media sterility. Upon completion of stock carbohydrate plate preparation, the plates were wrapped in a seal of parafilm and frozen at −20° C.

### 3. Inoculum and Culture

[0447] First, the frozen stock carbohydrate plates were prepared for inoculation by being defrosted, centrifuged at 400 rpm for 1 minute, and placed in an anaerobic chamber for one hour before use.

[0448] The previously isolated bacterial strains Bifidobacteria and Lactobacillus were cultured overnight in complete media with glucose.

[0449] A 1:100 dilution of the Bifidobacteria and Lactobacilli cultures were prepared in a basal media without carbohydrates (TABLEs 3-4).

[0450] After dilution, 180 μL of the diluted bacterial strain was pipetted into each well of row A, row B, row C, row D, row E, and row F of the defrosted and anaerobically stored stock carbohydrate plates as diagrammed in FIG. 3. For the sterile media controls, 180 μL of basal media (TABLEs 3-4) were pipetted into each well of row G and row H as diagrammed in FIG. 3.

Inoculated culture plates were incubated anaerobically in a spectrophotometer at 37° C. with the lid temperature set to +2° C. to reduce condensation during optical density readings.

[0451] The OD₆₀₀ spectrophotometer measurement of each well of the stock carbohydrate plates was taken every 30 minutes, after a 30 second orbital shaking period, for a 24-48-hour time period.

### Example 7: Cross-Feeding Assay

[0452] Provided herein are methods for the identifying donor and recipient bacterial strains for generation of a collective microbial consortium. The methods comprise preparation and testing of cross-feeding capabilities for the purpose of screening candidate bacterial isolates with complementary MOAs for their ability to utilize carbohydrates and growth factors that may promote host colonization, and their ability to secrete growth-supporting compounds. Donor strains were screened for their ability to produce bacterial products that support the growth of recipient strains that are incapable of directly using the initial niche-relevant carbohydrate. Such strains may be used as part of a microbial consortium described herein. FIG. 2 illustrates the overall direct carbohydrate utilization screening method.

### 1) Selection of Donor Strains and Recipient Strains

[0453] Candidate therapeutic selected bacterial strains of interest belonging to Lactobacillus and Bifidobacterium genera were selected and screened for their ability to utilize an array of distinct, niche-relevant carbohydrates. (A subset shown in TABLE 6). Primary strong consumers of carbohydrates of particular relevance for engraftment in the vaginal canal (glycogen, maltose, maltodextrin) or in the infant gastro-intestinal tract (HMOs, lactose) were prioritized as donor strains. Donor strains were screened for their ability to produce bacterial products that support the growth of recipient strains that are incapable of directly using the initial niche-relevant carbohydrate. Recipient strains were chosen based on strong performance in additional disease-relevant MOA studies, such as those in EXAMPLES 2-3, 6, 8, and 10-11.

### 2. Production and Collection of Donor Strain Metabolic Products

[0454] For generation of the donor strain (donor) metabolic products, 5 mL of desired growth media was prepared in a 15 mL culture tube under anaerobic conditions. Culture media from TABLES 3 and 4 were used for donor strain growth and were supplemented with niche-relevant carbohydrates of interest as outlined in TABLE 6. The sterile culture media were inoculated at a 1% v/v using a culture of the donor test strains grown in rich media for 24-36 h at 37° C. under anaerobic or microaerophilic atmosphere. Donor strain cultures were grown in single carbon source media for 24-36 h to stationary phase at 37° C. under anaerobic or microaerophilic atmosphere. Culture growth was monitored by OD600 in a 96-well plate spectrophotometer. After entering stationary phase, cells were centrifuged for 10 min at 2,700×g and cell-free supernatant containing metabolic products of the donor strain selected were collected under sterile conditions. All donor selected supernatants were collected and pH adjusted to 6.0 using sodium hydroxide, followed by filter sterilization using a 0.22 um syringe filter. Sterile supernatants containing donor strain selected metabolic products were allowed to fully reduce in the anaerobic chamber for 18-24 h prior to subsequent use. Control media that were not inoculated with any donor strain selected were also processed as negative controls. Purity of donor cultures was evaluated at each process using microscopy and 16S rRNA gene sequencing. Metabolic products from donor strains were stored at −80° C. for subsequent use when not immediately utilized.

### Evaluation of Recipient Strain Growth on Donor Strain Metabolic Products

[0455] The ability of donor strains to produce bacterial products

[0456] that support the growth of recipient strains was subsequently evaluated using sterile donor strain metabolic products. An overnight culture of the test recipient selected was grown in rich media for 24-36 h to stationary phase at 37° C. under anaerobic or microaerophilic atmosphere and served as an inoculum culture. Once in stationary phase, 1 mL of the culture was separated by centrifugation for 10 min at 2,700×g. The culture media and supernatant were removed, and the cell pellet was resuspended in 1 mL of mBasal media (TABLE 3) with no carbohydrate source.

TABLE 3
mBasal Media.

| Component | Amount (g/L) |
|---|---|
| Peptone (BBL Trypticase | 10 |
| Peptone BD 211921) | |
| Yeast Extract | 2 |
| NaCl | 5 |
| Magnesium sulfate | 0.2 |
| Dipotassium hydrogen | 2 |
| phosphate | |
| L-cysteine | 0.5 |

[0457] Donor test media were prepared in 5 mL volumes in 15 culture tubes. Test media consisting of 9-parts donor selected cell free supernatant and 1-part 10× growth media (-glucose). Growth media was composed of 10×YFAP (for Bifidobacterium strains) or 10×vMRS (for Lactobacillus strains). The donor test culture media were inoculated with 1% v/v of the recipient selected strain resuspended in minimal media (such as mBasal) containing donor selected metabolic products as a media base. Recipient strains were grown in donor test media for 24-36 h at 37° C. under anaerobic atmosphere (90% N₂, 5% CO₂, 5% H₂). Growth was monitored by OD₆₀₀ in an incubated spectrophotometer.

### Example 8: Analysis of Data for Direct Carbohydrate Utilization Screening and Cross-Feeding Assay

[0458] Provided herein are methods for growth curve area analysis to determine the growth response of each bacterial strain of interest to various carbohydrate medias. Such strains may be used as part of a microbial consortium described herein.

[0459] A growth curve can be plotted for each inoculated well using the R package Growthcurver. Growthcurver can then be used to calculate the area under the growth curve (AUC) for each well. The Growthcurver program may be run with all default parameters, including subtracting the OD₆₀₀ measurement of water or sterile media in each row, which can be the minimum OD₆₀₀ value, from each well. The growth curves may be manually inspected for bubbles and inconsistencies, and if bubbles or inconsistencies are found, these wells may be excluded from analysis.

[0460] The average AUC may be computed for each carbohydrate type as listed in TABLE 6, and the AUC value for the water control may be subtracted from every AUC value to factor in baseline growth. The AUC obtained for each carbohydrate can be divided by the AUC obtained with glucose media to obtain the AUC ratio (AUC_{carbohydrate}/AUC_{glucose}). An AUC ratio at or close to 1 indicates the carbohydrate may have been used efficiently as a growth factor by the bacteria.

[0461] To visualize the data, the Python libraries matplotlib and seaborn may be used to generate growth curve plots and visualize AUC ratios as shown in FIG. 4 and FIG. 5. Carbohydrate utilization patterns across strains may be visualized by clustermaps as demonstrated in FIG. 4, and principal coordinates analysis are exemplified in FIG. 5.

[0462] Glucose AUC ratios can be plotted for each type of carbohydrate and used to predict the glucose AUC ratio of additional Lactobacillus strains, as illustrated in FIG. 6 and TABLE 7.

TABLE 7
Expected Lactobacillus Growth on Carbohydrate Medias

| | Carbohydrate | Expected Outcome |
|---|---|---|
| 1 | Glycogen | Growth |
| 2 | Maltose | Growth |
| 3 | Maltodextrin | Growth |
| 4 | Mucin | No Growth |
| 5 | N-Acetylneuraminic | No Growth |
| | Acid (Sialic Acid) | |
| 6 | Melibiose | Growth |
| 7 | Glucose | Growth |
| 8 | Water | No Growth |

### Example 9: Bifidobacteria and Lactobacillus Screening

[0463] Provided herein are methods for Bifidobacteria screening to determine the identity of strains of interest isolated from human samples. Such strains may be used as part of a microbial consortium described herein. Exemplary genome sequences are described in SEQ ID NOs: 1-30.

### 1. Bifidobacteria Sequencing

[0464] Bifidobacteria cells were cultured overnight in mBasal media. The culture was diluted 1× and grown to an OD₆₀₀ of 1.0 as 15 mL aliquots. The culture was then aliquoted into 1 mL sample aliquots and centrifuged until a cell pellet was formed and bound to a magnetic, thermoplastic disk made with silica nanomaterial. The supernatant was poured off and the pellets were frozen at −20° C.

[0465] The Bifidobacteria cells were lysed by adding to the cell pellet 20 mg/mL of lysozyme and 250 U/mL or about 100 μL of mutanolysin, allowing the mixture to sit at room temperature for 1 hour. After 1 hour of lysing, the 1 mL tube was gently inverted to gently mix the cell pellet and lysing solution while keeping the pellet intact.

[0466] Following lysis, the cell pellet was washed three times by adding wash buffer solution and gently mixing the pellet and wash solution, then disposing of the wash solution. The cellular purification and DNA extraction method is illustrated in FIG. 7.

[0467] The eluate was then sequenced using Qubit fluorometer and Nanodrop spectrophotometer to detect the ng/μL measurements of the sample and optical density 260/280 and 260/230 of the eluate, example results are shown in FIGS. 8A and 8B.

[0468] The eluate was also sequenced using nanopore sequencing to analyze the length and purity of the DNA strands. Example results are shown in FIGS. 9A, 9B-9D and 9G.

[0469] The nanopore sequencing data was analyzed using prokka software to determine the number of genes and the average gene lengths for each species both polished and unpolished, the example results of which are shown in FIG. 9D-9G.

### 2. Lactobacillus Sequencing

[0470] Lactobacillus cells may be cultured overnight in mBasal media. The culture can be diluted 1× and grown to an OD₆₀₀ of 1.0 as 15 mL aliquots. The culture may then be aliquoted into 1 mL sample aliquots and centrifuged until a cell pellet forms and can be bound to a magnetic, thermoplastic disk made with silica nanomaterial. The supernatant may be poured off and the pellets can be frozen at −20° C.

[0471] The Lactobacillus cells may be lysed by adding to the cell pellet 20 mg/mL of lysozyme and 250 U/mL, or about 100 μL of mutanolysin, allowing the mixture to sit at room temperature for 1 hour.

[0472] Following binding of DNA to the thermoplastic, the DNA may be washed three times in wash buffer solution. The cellular purification and DNA extraction method is illustrated in FIG. 7.

[0473] The eluate may then be sequenced using Qubit fluorometer and Nanodrop spectrophotometer to detect the ng/μL measurements of the sample and optical density 260/280 and 260/230 of the eluate.

[0474] The nanopore sequencing data can also be analyzed using prokka software to determine the number of genes and the average gene lengths for each species both polished and unpolished.

### Example 10: Additional Assays

### Membrane Integrity Screen

[0475] Provided herein are various assays for determining additional functionality of bacterial strains. Such strains may be used as part of a microbial consortium described herein.

### Inducing Membrane Permeability Using TNFα

[0476] The method for the membrane integrity screen is shown in FIG. 10A. A monolayer of Caco-2 cells pre-treated with Interferon Gamma (IFNγ), except for the control wells, adhered to each well of a 24-well plate were incubated with pasteurized bacterial strains of interest. The monolayer of Caco-2 cells was cultured in either room air or CO₂ incubator conditions, the microscopy examples of which are shown in FIG. 10B. The plate map is shown in FIG. 10C. Tumor Necrosis Factor alpha (TNFα) solution was pipetted into each well as a membrane permeability insult. About 25 μL of FITC-Dextran-4 (FD4) solution was pipetted into each well as a fluorescent tag. The control wells were untreated with either IFNγ or TNFα. Another group received only the IFNγ, another group received only TNFα, and the remaining two groups received either 1 ng/mL or 10 ng/mL of TNFα. Example data of TNFα induced membrane permeability at various hours with the addition of TNF and PIK, demonstrating various amounts of membrane permeability over multiple hours is shown in FIG. 10D.

[0477] Transepithelial Electrical Resistance (TEER) was measured with a voltmeter or ohmmeter periodically for 4 hours post-TNFα treatment to determine membrane permeability of the Caco-2 monolayer cells, of which result examples are shown in FIGS. 11A and 11B. FD4 was added immediately after the 4-hour TEER measurement was taken. The membrane permeability was also measured via spectroscopy to determine the OD₆₀₀ of the FD4 fluorescence from the basolateral chamber, examples of the results of which are shown in FIGS. 11A and 11B.

[0478] TEER was also measured under various incubation conditions, for example the conditions of the Caco-2 epithelial cells cultured with room air incubation or CO₂ incubation, as well as with and without the addition of 20 μL of HCO₃ into the wells. The results of these conditions are exemplified in FIG. 12A-12D.

### RAW-Dual Reporter

### 1. SEAP Detection Assay

[0479] Screening for strains that alter production of immune response factor Nuclear Factor Kappa B (NFκB) was performed via SEAP detection assay. The RAW-Dual immortalized macrophage cell line with stable expression of NFκB and Interferon-Sensitive Response Element (ISRE) was pre-incubated with pasteurized bacterial strains of interest. About 20 μL of bacterial supernatant or pasteurized bacterial cells of interest was added to each well of a 96 well plate, and endotoxin-free water was added as a negative control. About 180 μL of cell suspension was added to each well, and the 96 well plate was incubated in an anaerobic chamber at about 37° C. for about 18-24 hours. About 180 μL of resuspended QUANTI-Blue™ solution was then added in each well, and about 20 μL of RAW cell supernatant was added.

[0480] The plate setup for the SEAP detection assay is illustrated in FIG. 15A, wherein about LPS of either 50 ng/mL or 5 ng/mL were added to either Basal or RAWless cells in addition to the bacterial products of the strains of interest. SEAP levels were determined via spectrophotometer measurement of each well of the 96 well plate at about 620-655 nm. The results of the SEAP test were plotted using PRISM software. An example in which the SEAP test was performed at Basal, MOI 10, MOI 5, and MOI 1 to determine the best MOI for the SEAP test are shown in FIG. 15B. The selected bacterial products dilution of the SEAP test was tested at Basal, 50×, 100×, and 200×, example results for AM ST7 are shown in FIG. 15C. SEAP testing was performed on various bacterial products derived from the bacterial strains of interest, example results of which are shown in FIG. 15D-15J.

### 2. Lucia Luciferase Detection Assay

[0481] Screening for strains that alter production of transcription-regulating Interferon Regulatory Factor (IRF) was performed via Lucia Luciferase (LUC) assay. The RAW-Dual immortalized macrophage cell line with stable expression of NFκB and Interferon-Sensitive Response Element (ISRE) was pre-incubated with pasteurized bacterial strains of interest. About 20 μL of bacterial supernatant or pasteurized bacterial cells of interest was added to each well of a 96 well plate, and endotoxin-free water was added as a negative control. About 180 μL of cell suspension was added to each well, and the 96 well plate was incubated in an anaerobic chamber at about 37° C. for about 18-24 hours. About 180 μL of resuspended QUANTI-Blue™ solution was then added in each well, and about 20 μL of RAW cell supernatant was added.

[0482] The plate setup for the LUC assay is illustrated in FIG. 15A, wherein LPS of either 50 ng/mL or 5 ng/mL were added to either Basal or RAWless cells in addition to the bacterial products of the strains of interest. LUC levels were immediately determined using luminometry. The results of the LUC test were plotted using GEN5 software, and examples of basal IRF activation data for various bacterial products of the strains of interest are shown in FIG. 16A. An example in which the LUC test was performed at Basal, MOI 10, MOI 5, and MOI 1 to determine the best MOI for the LUC test are shown in FIG. 16B. The ideal bacterial product dilution of the LUC test was tested at Basal, 50×, 100×, and 200×, example results for AM ST7 are shown in FIG. 16C. The examples of LUC test results for various bacterial products derived from bacterial strains of interest relative to differing levels of LPS are shown in FIG. 16D-16H. The LUC detection can be used to determine whether potential therapeutic bacterial strains activate inflammatory transcription factor (IRF) production.

### Example 11: Pathogen Assays

[0483] Provided herein are methods for executing pathogen assays to assess if bacterial products from bacterial strains of interest may inhibit the growth of pathogenic bacteria and the effects of those bacterial products on pathogen adherence to cells. Such strains may be used as part of a microbial consortium described herein.

### In Vitro Growth Inhibition

[0484] The ability of bacteria of interest to inhibit NEC pathogen growth via production of extracellular bacterial products was assessed by pathogen growth inhibition assay. The pathogens of interest were cultured in appropriate growth media. The growth of cultures was measured by spectroscopy and were back-diluted to achieve an OD₆₀₀ of 0.1 in the appropriate growth media. was used to measure the diluted culture and achieve an OD₆₀₀ of 0.01. The bacteria of interest were cultured in appropriate growth media, as shown in TABLEs 3-4. The cultures of the bacteria of interest were centrifuged to form a cell pellet. The supernatant was harvested and filter-sterilized using 0.22 μm filters. 20 μL of filtered cell-free supernatants were pipetted into wells of the 96-well plate as shown in FIG. 13A at a final concentration of 1/10 or 1/100 as indicated. Following the addition of the supernatants to the 96-well plate, 180 μL of each diluted pathogen culture of interest was pipetted into wells of the 96-well plate as shown in FIG. 13A.

[0485] The pathogen growth was monitored by measuring the OD₆₀₀ of the culture in each well of the 96-well plate for 8 hours. The effect of supernatants from bacteria of interest on pathogen growth is represented as the Pathogen Growth Ratio, which is the average AUC of treatment over the average AUC of a media control, an example of which showing various strains of interest is shown in FIG. 13B. The data was plotted to form a growth curve for the supernatant well of each bacterial strain of interest, examples of which are shown in FIG. 13A-13F. Dilutions of supernatants of bacteria of interest at 1/10 and 1/100 were also plotted with examples as shown in FIG. 14. For example, dose-dependent inhibition of E. coli was observed, with a 1:10 dilution of some bacterial products, for example ST27, exhibiting a greater inhibitory effect on E. coli growth than a 1:100 dilution of those bacterial products. For screening purposes, supernatants of strains of interest were tested at 1/10, as stronger inhibitory phenotypes were observed.

### Example 12: Methods for Treating BV or NEC

[0486] Provided herein are methods for treating BV or NEC using the compositions as described herein.

[0487] The composition described herein is administer to a subject. The subject can be a human subject with the vaginal diseases or infant gastrointestinal disease. For BV, the subject can be a human subject with BV. The subject can be a human subject with recurrent BV. For NEC, the subject can be a human subject with NEC. The subject can be an infant. The subject can be a mouse model that models the vaginal disease or infant gastrointestinal disease.

[0488] For treating BV, the subject is administered with the composition described herein vaginally. The composition can comprise a hydrogel. The composition can also be administered without the hydrogel. After the administration, the amount of the vaginal pathogen in the vagina of the subject is determined and compared to the control not administrated with the composition. Subjects can have a lower amount of vaginal pathogens subsequent to being administered with the composition.

[0489] For treating NEC, the subject is administered with the composition described herein orally. The composition can be formulated into a suspension. After the administration, the amount of the infant gastrointestinal pathogen in the gastrointestinal tract of the subject is determined and compared to the control not administrated with the composition. Subjects can have a lower amount of infant gastrointestinal pathogens subsequent to being administered with the composition. Additionally, the TLR4 signaling pathway activation can be determined. Subjects can have a lower activation of the TLR4 signaling pathway subsequent to being administered with the composition. For measuring TLR4 activation, a mouse model can comprise a TLR4 reporter, such as the IRES or SEAP reporter as described herein.

[0490] Other symptoms of BV or NEC can also be assessed to determine the therapeutic effect of the composition.

### NUMBERED EMBODIMENTS

Embodiment 1. A pharmaceutical composition comprising a bacterial population comprising a first bacterial strain and a second bacterial strain,
[0491] wherein said first bacterial strain and said second bacterial strain are different from one another,
[0492] wherein said bacterial population comprises Bifidobacterium sp. or Vertebrate-Associated Lactobacillaceae,
[0493] wherein said first bacterial strain, when present in a medium comprising an energy source and said second bacterial strain or a supernatant of said medium comprising said energy source and said second bacterial strain, exhibits a growth of at least about 105% by weight as compared to growth of said first bacterial strain when present in a medium comprising said energy source in an absence of said second bacterial strain or said supernatant of said medium comprising said energy source and said second bacterial strain, and
[0494] wherein said energy source does not comprise starch.
   Embodiment 2. The pharmaceutical composition of embodiment 1, wherein said supernatant of said medium comprising said energy source and said second bacterial strain is cell-free.
   Embodiment 3. The pharmaceutical composition of embodiment 1 or 2, wherein said supernatant of said medium comprising said energy source and said second bacterial strain comprises a fermentation product derived from said second bacterial strain.
   Embodiment 4. The pharmaceutical composition of any one of embodiments 1-3, wherein said first bacterial strain, when present within said medium comprising said energy source and said second bacterial strain or said supernatant of said medium comprising said energy source and said second bacterial strain, exhibits a growth for at most about 48 hours of at least about 105% by weight as compared to a growth of said first bacterial strain when present within said medium comprising said energy source in an absence of said second bacterial strain or said supernatant of said medium comprising said energy source and said second bacterial strain for at most about 48 hours.
   Embodiment 5. The pharmaceutical composition of embodiment 4, wherein said first bacterial strain, when present within said medium comprising said energy source and said second bacterial strain or said supernatant of said medium comprising said energy source and said second bacterial strain, exhibits a growth for at most about 24 hours of at least about 105% by weight as compared to a growth of said first bacterial strain when present within said medium comprising said energy source in an absence of said second bacterial strain or said supernatant of said medium comprising said energy source and said second bacterial strain for at most about 24 hours.
   Embodiment 6. The pharmaceutical composition of embodiment 5, wherein said first bacterial strain, when present within said medium comprising said energy source and said second bacterial strain or said supernatant of said medium comprising said energy source and said second bacterial strain, exhibits a growth for at most about 12 hours of at least about 105% by weight as compared to a growth of said first bacterial strain when present within said medium comprising said energy source in an absence of said second bacterial strain or said supernatant of said medium comprising said energy source and said second bacterial strain for at most about 12 hours.
   Embodiment 7. The pharmaceutical composition of any one of embodiments 1-6, wherein said first bacterial strain, when present within said medium comprising said energy source and said second bacterial strain or said supernatant of said medium comprising said energy source and said second bacterial strain, exhibits said growth of at least about 150% by weight as compared to said growth of said first bacterial strain when present within said medium comprising said energy source in an absence of said second bacterial strain or said supernatant of said medium comprising said energy source and said second bacterial strain.
   Embodiment 8. The pharmaceutical composition of embodiment 7, wherein said first bacterial strain, when present within said medium comprising said energy source and said second bacterial strain or said supernatant of said medium comprising said energy source and said second bacterial strain, exhibits said growth of at least about 1000% by weight as compared to said growth of said first bacterial strain when present within said medium comprising said energy source in an absence of said second bacterial strain or said supernatant of said medium comprising said energy source and said second bacterial strain.
   Embodiment 9. The pharmaceutical composition of embodiment 8, wherein said first bacterial strain, when present within said medium comprising said energy source and said second bacterial strain or said supernatant of said medium comprising said energy source and said second bacterial strain, exhibits said growth of at least about 10000% by weight as compared to said growth of said first bacterial strain when present within said medium comprising said energy source in an absence of said second bacterial strain or said supernatant of said medium comprising said energy source and said second bacterial strain.
   Embodiment 10. The pharmaceutical composition of any one of embodiments 1-9, wherein said pharmaceutical composition is formulated in an enteral dosage form, an injectable dosage form, a parenteral dosage form, a topical dosage form, or a combination thereof.
   Embodiment 11. The pharmaceutical composition of embodiment 10, wherein said enteral dosage form comprises an oral dosage form, an intragastric dosage form, or a rectal dosage form.
   Embodiment 12. The pharmaceutical composition of embodiment 11, wherein said intragastric dosage form comprises a dosage form that is configured to pass through a feeding tube.
   Embodiment 13. The pharmaceutical composition of any one of embodiments 1-12, wherein said Vertebrate-Associated Lactobacillaceae comprises Vertebrate-Associated Lactobacillaceae, LimosiVertebrate-Associated Lactobacillaceae, LigiVertebrate-Associated Lactobacillaceae, Lacticaseibacillus sp., or a combination thereof.
   Embodiment 14. The pharmaceutical composition of any one of embodiments 1-13, wherein said Vertebrate-Associated Lactobacillaceae comprises Lactobacillus crispatus, Lactobacillus gasseri, Limosilactobacillus vaginalis, Limosilactobacillus fermentum, Lactobacillus plantarum, Lactobacillus jensenii, Lacticaseibacillus paracasei, or a combination thereof.
   Embodiment 15. The pharmaceutical composition of any one of embodiments 1-14, wherein said Bifidobacterium sp. comprises B. animalis, B. pseudocatenulatum, B. bifidum, B. breve, B. dentium, B. faecale, B. longum, or a combination thereof.
   Embodiment 16. The pharmaceutical composition of any one of embodiments 1-15, wherein said first bacterial strain comprises said Bifidobacterium sp. or said Vertebrate-Associated Lactobacillaceae.
   Embodiment 17. The pharmaceutical composition of embodiment 16, wherein said first bacterial strain comprises said Bifidobacterium sp.
   Embodiment 18. The pharmaceutical composition of embodiment 16, wherein said first bacterial strain comprises said Vertebrate-Associated Lactobacillaceae.
   Embodiment 19. The pharmaceutical composition of embodiment 18, wherein second bacterial strain comprises said Bifidobacterium sp. or said Vertebrate-Associated Lactobacillaceae.
   Embodiment 20. The pharmaceutical composition of embodiment 19, wherein said second bacterial strain comprises said Bifidobacterium sp.
   Embodiment 21. The pharmaceutical composition of embodiment 19, wherein said second bacterial strain comprises said Vertebrate-Associated Lactobacillaceae.
   Embodiment 22. The pharmaceutical composition of any one of embodiments 1-21, wherein said starch is not a modified starch.
   Embodiment 23. The pharmaceutical composition of embodiment 22, wherein said starch is not a fermented starch.
   Embodiment 24. The pharmaceutical composition of embodiment 23, wherein said fermented starch is not a dextrin.
   Embodiment 25. The pharmaceutical composition of embodiment 24, wherein said dextrin is not a maltodextrin.
   Embodiment 26. The pharmaceutical composition of embodiment 25, wherein said energy source comprises fructooligosaccharides (FOS), guar gum, corn syrup, polydextrose, Galacto-Oligosaccharides (GOS), lactose, inulin, mucin, sialic acid, glucan, fructose, N-Acetylglucosamine (GlcNAc), mannose, Lacto-N-neotetraose (LNnT), glucose, 2′-Fucosyllactose (2′-FL), galactose, fructose, pectin, or a combination thereof.
   Embodiment 27. The pharmaceutical composition of any one of embodiments 1-26, wherein said pharmaceutical composition further comprises a pharmaceutically acceptable excipient, a cryoprotectant, or a combination thereof.
   Embodiment 28. The pharmaceutical composition of any one of embodiments 1-27, wherein said pharmaceutical composition further comprises Akkermansia sp., Anaerbutyricum sp., Anaerostipes sp., Anaerotignum sp., Bacillus sp., Bacteroides sp., Blautia sp., Clostridium sp., Collinsella sp., Coprococcus sp., Dorea sp., Enterococcus sp., Erysipelatoclostridium sp., Escherichia sp., Eubacterium sp., Faecalibacterium sp., Faecalicatena sp., Holdemanella sp., Lachnospira sp., Longibaculum sp., Paraprevotella sp., Parabacteroides sp., Pediococcus sp., Roseburia sp., Ruminococcus sp., Veillonella sp., or a combination thereof.
   Embodiment 29. A pharmaceutical composition comprising a bacterial population comprising a first bacterial strain and a second bacterial strain,
[0495] wherein said first bacterial strain and said second bacterial strain are different from one another,
[0496] wherein said bacterial population comprises Bifidobacterium sp. or Vertebrate-Associated Lactobacillaceae,
[0497] wherein said first bacterial strain, when present within a medium comprising a secreted metabolite derived from said second bacterial strain, proliferates for at least about 10 cell divisions.
   Embodiment 30. The pharmaceutical composition of embodiment 29, wherein said medium comprising said secreted metabolite derived from said second bacterial strain comprises a supernatant derived from a growth culture of said second bacterial strain.
   Embodiment 31. The pharmaceutical composition of embodiment 30, wherein said supernatant derived from said growth culture of said second bacterial strain is cell-free.
   Embodiment 32. The pharmaceutical composition of any one of embodiments 29-31, wherein said first bacterial strain, when present within said medium comprising said secreted metabolite derived from said second bacterial strain, proliferates for at least about 10 cell divisions within at most about 48 hours.
   Embodiment 33. The pharmaceutical composition of embodiment 32, wherein said first bacterial strain, when present within said medium comprising said secreted metabolite derived from said second bacterial strain, proliferates for at least about 10 cell divisions within at most about 24 hours.
   Embodiment 34. The pharmaceutical composition of embodiment 33, wherein said first bacterial strain, when present within said medium comprising said secreted metabolite derived from said second bacterial strain, proliferates for at least about 10 cell divisions within at most about 12 hours.
   Embodiment 35. The pharmaceutical composition of any one of embodiments 29-34, wherein said first bacterial strain, when present within said medium comprising said secreted metabolite derived from said second bacterial strain, proliferates for at least about 15 cell divisions.
   Embodiment 36. The pharmaceutical composition of embodiment 35, wherein said first bacterial strain, when present within said medium comprising said secreted metabolite derived from said second bacterial strain, proliferates for at least about 20 cell divisions.
   Embodiment 37. The pharmaceutical composition of embodiment 36, wherein said first bacterial strain, when present within said medium comprising said secreted metabolite derived from said second bacterial strain, proliferates for at least about 32 cell divisions.
   Embodiment 38. The pharmaceutical composition of any one of embodiments 29-37, wherein said pharmaceutical composition is formulated in an enteral dosage form, an injectable dosage form, a parenteral dosage form, a topical dosage form, or a combination thereof.
   Embodiment 39. The pharmaceutical composition of embodiment 38, wherein said enteral dosage form comprises an oral dosage form, an intragastric dosage form, or a rectal dosage form.
   Embodiment 40. The pharmaceutical composition of embodiment 39, wherein said intragastric dosage form comprises a dosage form that is configured to pass through a feeding tube.
   Embodiment 41. The pharmaceutical composition of any one of embodiments 29-40, wherein said Vertebrate-Associated Lactobacillaceae comprises Vertebrate-Associated Lactobacillaceae, LimosiVertebrate-Associated Lactobacillaceae, LigiVertebrate-Associated Lactobacillaceae, Lacticaseibacillus sp., or a combination thereof.
   Embodiment 42. The pharmaceutical composition of any one of embodiments 29-41, wherein said Vertebrate-Associated Lactobacillaceae comprises Lactobacillus crispatus, Lactobacillus gasseri, Limosilactobacillus vaginalis, Limosilactobacillus fermentum, Lactobacillus plantarum, Lactobacillus jensenii, Lacticaseibacillus paracasei, or a combination thereof.
   Embodiment 43. The pharmaceutical composition of any one of embodiments 29-42 wherein said Bifidobacterium sp. comprises B. animalis, B. pseudocatenulatum, B. bifidum, B. breve, B. dentium, B. faecale, B. longum, or a combination thereof.
   Embodiment 44. The pharmaceutical composition of any one of embodiments 29-43, wherein said first bacterial strain comprises said Bifidobacterium sp. or said Vertebrate-Associated Lactobacillaceae.
   Embodiment 45. The pharmaceutical composition of embodiment 44, wherein said first bacterial strain comprises said Bifidobacterium sp.
   Embodiment 46. The pharmaceutical composition of embodiment 44, wherein said first bacterial strain comprises said Vertebrate-Associated Lactobacillaceae.
   Embodiment 47. The pharmaceutical composition of any one of embodiments 29-46, wherein second bacterial strain comprises said Bifidobacterium sp. or said Vertebrate-Associated Lactobacillaceae.
   Embodiment 48. The pharmaceutical composition of embodiment 47, wherein said second bacterial strain comprises said Bifidobacterium sp.
   Embodiment 49. The pharmaceutical composition of embodiment 47, wherein said second bacterial strain comprises said Vertebrate-Associated Lactobacillaceae.
   Embodiment 50. The pharmaceutical composition of any one of embodiments 29-49, wherein said energy source comprises fructooligosaccharides (FOS), guar gum, corn syrup, polydextrose, Galacto-Oligosaccharides (GOS), lactose, inulin, mucin, sialic acid, glucan, fructose, N-Acetylglucosamine (GlcNAc), mannose, Lacto-N-neotetraose (LNnT), glucose, 2′-Fucosyllactose (2′-FL), galactose, fructose, pectin, starch, or a combination thereof.
   Embodiment 51. The pharmaceutical composition of embodiment 50, wherein said starch comprises a modified starch.
   Embodiment 52. The pharmaceutical composition of embodiment 51, wherein said starch comprises a fermented starch.
   Embodiment 53. The pharmaceutical composition of any one of embodiments 29-52, wherein said fermented starch comprises a dextrin.
   Embodiment 54. The pharmaceutical composition of embodiment 53, wherein said dextrin comprises a maltodextrin.
   Embodiment 55. The pharmaceutical composition of any one of embodiments 29-54, wherein said pharmaceutical composition further comprises a pharmaceutically acceptable excipient, a cryoprotectant, or a combination thereof.
   Embodiment 56. The pharmaceutical composition of any one of embodiments 29-55, wherein said pharmaceutical composition further comprises Akkermansia sp., Anaerbutyricum sp., Anaerostipes sp., Anaerotignum sp., Bacillus sp., Bacteroides sp., Blautia sp., ClostridiumCollinsella sp., Coprococcus sp., Dorea sp., Enterococcus sp., Erysipelatoclostridium sp., Escherichia sp., Eubacterium sp., Faecalibacterium sp., Faecalicatena sp., Holdemanella sp., Lachnospira sp., Longibaculum sp., Paraprevotella sp., Parabacteroides sp., Pediococcus sp., Roseburia sp., Ruminococcus sp., Veillonella sp., or a combination thereof.
   Embodiment 57. A pharmaceutical composition comprising a bacterial population comprising a first bacterial strain and a second bacterial strain,
[0498] wherein said first bacterial strain and said second bacterial strain are different from one another,
[0499] wherein said bacterial population comprises Bifidobacterium sp. or Vertebrate-Associated Lactobacillaceae,
[0500] wherein said first bacterial strain, when present within a medium comprising a secreted metabolite derived from said second bacterial strain and a layer of epithelial cells, decreases permeability of said layer of epithelial cells by at least about 5%, as compared to permeability of a layer of epithelial cells present within a medium comprising said first bacterial strain in an absence of said secreted metabolite, and
   wherein said permeability of said layer of epithelial cells is measured by transport of a Fluorescein isothiocyanate (FITC)-conjugated dextran or by transepithelial electrical resistance across said layer of epithelial cells.
   Embodiment 58. The pharmaceutical composition of embodiment 57, wherein said medium comprising said secreted metabolite derived from said second bacterial strain comprises a supernatant derived from a growth culture of said second bacterial strain.
   Embodiment 59. The pharmaceutical composition of embodiment 58, wherein said supernatant derived from said growth culture of said second bacterial strain is cell-free.
   Embodiment 60. The pharmaceutical composition of any one of embodiments 57-59, wherein said secreted metabolite derived from said second bacterial strain comprises a fermentation product derived from said second bacterial strain.
   Embodiment 61. The pharmaceutical composition any one of embodiments 57-60, wherein said first bacterial strain, when present within said medium comprising said secreted metabolite derived from said second bacterial strain, decreases said permeability of said layer of epithelial cells by at least about 10%, as compared to said permeability of said layer of epithelial cells present within said medium comprising said first bacterial strain in said absence of said secreted metabolite.
   Embodiment 62. The pharmaceutical composition of embodiment 61, wherein said first bacterial strain, when present within said medium comprising said secreted metabolite derived from said second bacterial strain, decreases said permeability of said layer of epithelial cells by at least about 20%, as compared to said permeability of said layer of epithelial cells present within said medium comprising said first bacterial strain in said absence of said secreted metabolite.
   Embodiment 63. The pharmaceutical composition of embodiment 62, wherein said first bacterial strain, when present within said medium comprising said secreted metabolite derived from said second bacterial strain, decreases said permeability of said layer of epithelial cells by at least about 50%, as compared to said permeability of said layer of epithelial cells present within said medium comprising said first bacterial strain in said absence of said secreted metabolite.
   Embodiment 64. The pharmaceutical composition of any one of embodiments 57-63, wherein said epithelial cells comprise mammalian epithelial cells.
   Embodiment 65. The pharmaceutical composition of embodiment 64, wherein said mammalian epithelial cells comprises human epithelial cells.
   Embodiment 66. The pharmaceutical composition of any one of embodiments 57-65, wherein said pharmaceutical composition is formulated in an enteral dosage form, an injectable dosage form, a parenteral dosage form, a topical dosage form, or a combination thereof.
   Embodiment 67. The pharmaceutical composition of embodiment 65, wherein said enteral dosage form comprises an oral dosage form, an intragastric dosage form, or a rectal dosage form.
   Embodiment 68. The pharmaceutical composition of embodiment 66, wherein said intragastric dosage form comprises a dosage form that is configured to pass through a feeding tube.
   Embodiment 69. The pharmaceutical composition of any one of embodiments 57-68, wherein said Vertebrate-Associated Lactobacillaceae comprises Vertebrate-Associated Lactobacillaceae, LimosiVertebrate-Associated Lactobacillaceae, LigiVertebrate-Associated Lactobacillaceae, Lacticaseibacillus sp., or a combination thereof.
   Embodiment 70. The pharmaceutical composition of any one of embodiments 57-69, wherein said Vertebrate-Associated Lactobacillaceae comprises Lactobacillus crispatus, Lactobacillus gasseri, Limosilactobacillus vaginalis, Limosilactobacillus fermentum, Lactobacillus plantarum, Lactobacillus jensenii, Lacticaseibacillus paracasei, or a combination thereof.
   Embodiment 71. The pharmaceutical composition of any one of embodiments 57-70, wherein said Bifidobacterium sp. comprises B. animalis, B. pseudocatenulatum, B. bifidum, B. breve, B. dentium, B. faecale, B. longum, or a combination thereof.
   Embodiment 72. The pharmaceutical composition of any one of embodiments 57-71, wherein said first bacterial strain comprises said Bifidobacterium sp. or said Vertebrate-Associated Lactobacillaceae.
   Embodiment 73. The pharmaceutical composition of embodiment 72, wherein said first bacterial strain comprises said Bifidobacterium sp.
   Embodiment 74. The pharmaceutical composition of embodiment 72, wherein said first bacterial strain comprises said Vertebrate-Associated Lactobacillaceae.
   Embodiment 75. The pharmaceutical composition of any one of embodiments 57-58, wherein said second bacterial strain comprises said Bifidobacterium sp. or said Vertebrate-Associated Lactobacillaceae.
   Embodiment 76. The pharmaceutical composition of embodiment 75, wherein said second bacterial strain comprises said Bifidobacterium sp.
   Embodiment 77. The pharmaceutical composition of embodiment 75, wherein said second bacterial strain comprises Vertebrate-Associated Lactobacillaceae.
   Embodiment 78. The pharmaceutical composition of any one of embodiments 57-77, wherein said energy source comprises fructooligosaccharides (FOS), guar gum, corn syrup, polydextrose, Galacto-Oligosaccharides (GOS), lactose, inulin, mucin, sialic acid, glucan, fructose, N-Acetylglucosamine (GlcNAc), mannose, Lacto-N-neotetraose (LNnT), glucose, 2′-Fucosyllactose (2′-FL), galactose, fructose, pectin, starch, or a combination thereof.
   Embodiment 79. The pharmaceutical composition of embodiment 78, wherein said starch comprises a modified starch.
   Embodiment 80. The pharmaceutical composition of embodiment 79, wherein said starch comprises a fermented starch.
   Embodiment 81. The pharmaceutical composition of embodiment 80, wherein said fermented starch comprises a dextrin.
   Embodiment 82. The pharmaceutical composition of embodiment 81, wherein said dextrin comprises a maltodextrin.
   Embodiment 83. The pharmaceutical composition of any one of embodiments 57-82, wherein said pharmaceutical composition further comprises a pharmaceutically acceptable excipient, a cryoprotectant, or a combination thereof.
   Embodiment 84. The pharmaceutical composition of any one of embodiments 57-83, wherein said pharmaceutical composition further comprises Akkermansia sp., Anaerbutyricum sp., Anaerostipes sp., Anaerotignum sp., Bacillus sp., Bacteroides sp., Blautia sp., ClostridiumCollinsella sp., Coprococcus sp., Dorea sp., Enterococcus sp., Erysipelatoclostridium sp., Escherichia sp., Eubacterium sp., Faecalibacterium sp., Faecalicatena sp., Holdemanella sp., Lachnospira sp., Longibaculum sp., Paraprevotella sp., Parabacteroides sp., Pediococcus sp., Roseburia sp., Ruminococcus sp., Veillonella sp., or a combination thereof.
   Embodiment 85. A pharmaceutical composition comprising a bacterial population comprising a bacterial strain,
[0501] wherein said bacterial population comprises Bifidobacterium sp. or Vertebrate-Associated Lactobacillaceae, and
[0502] wherein a secreted metabolite or an inviable cell derived from said bacterial strain, when combined with an engineered cell comprising a reporter, decreases a signal of said reporter by at least about 5% as compared to a signal of said reporter when said engineered cell is not combined with said metabolite or said inviable cell derived from said bacterial strain.
   Embodiment 86. The pharmaceutical composition of embodiment 85, wherein said medium comprising said secreted metabolite or said inviable cells derived from said bacterial strain comprises a supernatant derived from a growth culture of said bacterial strain.
   Embodiment 87. The pharmaceutical composition of embodiment 86, wherein said supernatant derived from said growth culture of said bacterial strain is cell-free.
   Embodiment 88. The pharmaceutical composition of any one of embodiments 85-87, wherein said medium comprising said secreted metabolite or said inviable cells derived from said bacterial strain comprises a fermentation product derived from a growth culture of said bacterial strain.
   Embodiment 89. The pharmaceutical composition of any one of embodiments 85-88, wherein said secreted metabolite derived from said bacterial strain comprises a fermentation product derived from said bacterial strain.
   Embodiment 90. The pharmaceutical composition of any one of embodiments 85-89, wherein said engineered cell comprises a macrophage.
   Embodiment 91. The pharmaceutical composition of any one of embodiments 85-90, wherein said inviable cell comprises a pasteurized cell.
   Embodiment 92. The pharmaceutical composition of any one of embodiments 85-91, wherein said reporter comprises a nuclear factor kappa-light-chain-enhancer of activated B cells (NFkB) reporter or an interferon-sensitive response element reporter (ISRE).
   Embodiment 93. The pharmaceutical composition of embodiment 92, wherein said NFkB reporter comprises a secreted embryonic alkaline phosphatase (SEAP) reporter.
   Embodiment 94. The pharmaceutical composition of embodiment 92, wherein said ISRE reporter comprises a Lucia luciferase.
   Embodiment 95. The pharmaceutical composition of any one of embodiments 85-94, wherein said secreted metabolite or said inviable cell derived from said bacterial strain, when combined with said engineered cell comprising said reporter, decreases said signal of said reporter by at least about 10% as compared to when said engineered cell is not combined with said metabolite or said inviable cell derived from said bacterial strain.
   Embodiment 96. The pharmaceutical composition of embodiment 95, wherein said secreted metabolite or said inviable cell derived from said bacterial strain, when combined with said engineered cell comprising said reporter, decreases said signal of said reporter by at least about 50% as compared to when said engineered cell is not combined with said metabolite or said inviable cell derived from said bacterial strain.
   Embodiment 97. The pharmaceutical composition of any one of embodiments 85-96, wherein said pharmaceutical composition is formulated in an enteral dosage form, an injectable dosage form, a parenteral dosage form, a topical dosage form, or a combination thereof.
   Embodiment 98. The pharmaceutical composition of embodiment 97, wherein said enteral dosage form comprises an oral dosage form, an intragastric dosage form, or a rectal dosage form.
   Embodiment 99. The pharmaceutical composition of embodiment 98, wherein said intragastric dosage form comprises a dosage form that is configured to pass through a feeding tube.
   Embodiment 100. The pharmaceutical composition of any one of embodiments 85-99, wherein said bacterial strain comprises said Bifidobacterium sp. or said Vertebrate-Associated Lactobacillaceae.
   Embodiment 101. The pharmaceutical composition of embodiment 100, wherein said bacterial strain comprises said Bifidobacterium sp.
   Embodiment 102. The pharmaceutical composition of embodiment 101, wherein said Bifidobacterium sp. comprises B. animalis, B. pseudocatenulatum, B. bifidum, B. breve, B. dentium, B. faecale, B. longum, or a combination thereof.
   Embodiment 103. The pharmaceutical composition of embodiment 100, wherein said bacterial strain comprises said Vertebrate-Associated Lactobacillaceae.
   Embodiment 104. The pharmaceutical composition of embodiment 103, wherein said Vertebrate-Associated Lactobacillaceae comprises Vertebrate-Associated Lactobacillaceae, LimosiVertebrate-Associated Lactobacillaceae, LigiVertebrate-Associated Lactobacillaceae, Lacticaseibacillus sp., or a combination thereof.
   Embodiment 105. The pharmaceutical composition of any one of embodiments 85-104, wherein said Vertebrate-Associated Lactobacillaceae comprises Lactobacillus crispatus, Lactobacillus gasseri, Limosilactobacillus vaginalis, Limosilactobacillus fermentum, Lactobacillus plantarum, Lactobacillus jensenii, Lacticaseibacillus paracasei, or a combination thereof.
   Embodiment 106. The pharmaceutical composition of any one of embodiments 85-105, wherein said energy source comprises fructooligosaccharides (FOS), guar gum, corn syrup, polydextrose, Galacto-Oligosaccharides (GOS), lactose, inulin, mucin, sialic acid, glucan, fructose, N-Acetylglucosamine (GlcNAc), mannose, Lacto-N-neotetraose (LNnT), glucose, 2′-Fucosyllactose (2′-FL), galactose, fructose, pectin, starch, or a combination thereof.
   Embodiment 107. The pharmaceutical composition of embodiment 106, wherein said starch comprises a modified starch.
   Embodiment 108. The pharmaceutical composition of embodiment 107, wherein said starch comprises a fermented starch.
   Embodiment 109. The pharmaceutical composition of embodiment 108, wherein said fermented starch comprises a dextrin.
   Embodiment 110. The pharmaceutical composition of embodiment 109, wherein said dextrin comprises a maltodextrin.
   Embodiment 111. The pharmaceutical composition of any one of embodiments 85-110, wherein said pharmaceutical composition further comprises a pharmaceutically acceptable excipient, a cryoprotectant, or a combination thereof.
   Embodiment 112. The pharmaceutical composition of any one of embodiments 85-111, wherein said pharmaceutical composition further comprises Akkermansia sp., Anaerbutyricum sp., Anaerostipes sp., Anaerotignum sp., Bacillus sp., Bacteroides sp., Blautia sp., ClostridiumCollinsella sp., Coprococcus sp., Dorea sp., Enterococcus sp., Erysipelatoclostridium sp., Escherichia sp., Eubacterium sp., Faecalibacterium sp., Faecalicatena sp., Holdemanella sp., Lachnospira sp., Longibaculum sp., Paraprevotella sp., Parabacteroides sp., Pediococcus sp., Roseburia sp., Ruminococcus sp., Veillonella sp., or a combination thereof.
   Embodiment 113. A pharmaceutical composition comprising a bacterial population comprising a first bacterial strain and a second bacterial strain,
[0503] wherein said first bacterial strain and said second bacterial strains are different from one another,
[0504] wherein said bacterial population comprises Bifidobacterium sp. or Vertebrate-Associated Lactobacillaceae,
[0505] wherein said first bacterial strain, when present within a medium comprising said second bacterial strain or a supernatant thereof for at most about 15 hours, exhibits a growth of at least about 105% by colony-forming unit (CFU) as compared to a growth of said first bacterial strain when present within a medium not comprising said second bacterial strain or said supernatant thereof for at most about 15 hours.
   Embodiment 114. The pharmaceutical composition of embodiment 113, wherein said medium comprising said second bacterial strain or said supernatant thereof comprises a secreted metabolite derived from said second bacterial strain.
   Embodiment 115. The pharmaceutical composition of embodiment 114, wherein said secreted metabolite derived from said second bacterial strain comprises a fermentation product of derived from said second bacterial strain.
   Embodiment 116. The pharmaceutical composition of any one of embodiments 113-115, wherein said supernatant of said medium comprising said second bacterial strain is cell-free.
   Embodiment 117. The pharmaceutical composition of any one of embodiments 113-116, wherein said first bacterial strain, when present within said medium comprising said second bacterial strain or a supernatant thereof for at most about 10 hours, exhibits a growth of at least about 105% by CFU as compared to a growth of said first bacterial strain when present within said medium not comprising said second bacterial strain or said supernatant thereof for at most about 10 hours.
   Embodiment 118. The pharmaceutical composition of embodiment 117, wherein said first bacterial strain, when present within said medium comprising said second bacterial strain or a supernatant thereof for at most about 8 hours, exhibits a growth of at least about 105% by CFU as compared to a growth of said first bacterial strain when present within said medium for not comprising said second bacterial strain or said supernatant thereof for at most about 8 hours.
   Embodiment 119. The pharmaceutical composition of any one of embodiments 113-118, wherein said first bacterial strain, when present within said medium comprising said second bacterial strain or a supernatant thereof for at most about 15 hours, exhibits a growth of at least about 120% by CFU as compared to a growth of said first bacterial strain when present within said medium not comprising said second bacterial strain or said supernatant thereof for at most about 15 hours.
   Embodiment 120. The pharmaceutical composition of embodiment 119, wherein said first bacterial strain, when present within said medium comprising said second bacterial strain or a supernatant thereof for at most about 15 hours, exhibits a growth of at least about 150% by CFU as compared to a growth of said first bacterial strain when present within said medium not comprising said second bacterial strain or said supernatant thereof for at most about 15 hours.
   Embodiment 121. The pharmaceutical composition of embodiment 120, wherein said first bacterial strain, when present within said medium comprising said second bacterial strain or a supernatant thereof for at most about 15 hours, exhibits a growth of at least about 200% by CFU as compared to a growth of said first bacterial strain when present within said medium not comprising said second bacterial strain or said supernatant thereof for at most about 15 hours.
   Embodiment 122. The pharmaceutical composition of any one of embodiments 113-121, wherein said bacterial strain comprises said Bifidobacterium sp. or said Vertebrate-Associated Lactobacillaceae.
   Embodiment 123. The pharmaceutical composition of embodiment 122, wherein said bacterial strain comprises said Bifidobacterium sp.
   Embodiment 124. The pharmaceutical composition of embodiment 123, wherein said Bifidobacterium sp. comprises B. animalis, B. pseudocatenulatum, B. bifidum, B. breve, B. dentium, B. faecale, B. longum, or a combination thereof.
   Embodiment 125. The pharmaceutical composition of embodiment 123, wherein said bacterial strain comprises said Vertebrate-Associated Lactobacillaceae.
   Embodiment 126. The pharmaceutical composition of embodiment 125, wherein said Vertebrate-Associated Lactobacillaceae comprises Vertebrate-Associated Lactobacillaceae, LimosiVertebrate-Associated Lactobacillaceae, LigiVertebrate-Associated Lactobacillaceae, Lacticaseibacillus sp., or a combination thereof.
   Embodiment 127. The pharmaceutical composition of any one of embodiments 113-126, wherein said Vertebrate-Associated Lactobacillaceae comprises Lactobacillus crispatus, Lactobacillus gasseri, Limosilactobacillus vaginalis, Limosilactobacillus fermentum, Lactobacillus plantarum, Lactobacillus jensenii, Lacticaseibacillus paracasei, or a combination thereof.
   Embodiment 128. The pharmaceutical composition of any one of embodiments 113-127, wherein said energy source comprises fructooligosaccharides (FOS), guar gum, corn syrup, polydextrose, Galacto-Oligosaccharides (GOS), lactose, inulin, mucin, sialic acid, glucan, fructose, N-Acetylglucosamine (GlcNAc), mannose, Lacto-N-neotetraose (LNnT), glucose, 2′-Fucosyllactose (2′-FL), galactose, fructose, pectin, starch, or a combination thereof.
   Embodiment 129. The pharmaceutical composition of embodiment 128, wherein said starch comprises a modified starch.
   Embodiment 130. The pharmaceutical composition of embodiment 129, wherein said starch comprises a fermented starch.
   Embodiment 131. The pharmaceutical composition of any one of embodiments 113-130, wherein said fermented starch comprises a dextrin.
   Embodiment 132. The pharmaceutical composition of embodiment 131, wherein said dextrin comprises a maltodextrin.
   Embodiment 133. The pharmaceutical composition of any one of embodiments 113-132, wherein said pharmaceutical composition further comprises a pharmaceutically acceptable excipient, a cryoprotectant, or a combination thereof.
   Embodiment 134. The pharmaceutical composition of any one of embodiments 113-133, wherein said pharmaceutical composition further comprises Akkermansia sp., Anaerbutyricum sp., Anaerostipes sp., Anaerotignum sp., Bacillus sp., Bacteroides sp., Blautia sp., ClostridiumCollinsella sp., Coprococcus sp., Dorea sp., Enterococcus sp., Erysipelatoclostridium sp., Escherichia sp., Eubacterium sp., Faecalibacterium sp., Faecalicatena sp., Holdemanella sp., Lachnospira sp., Longibaculum sp., Paraprevotella sp., Parabacteroides sp., Pediococcus sp., Roseburia sp., Ruminococcus sp., Veillonella sp., or a combination thereof.
   Embodiment 135. A pharmaceutical composition comprising a bacterial population comprising a first bacterial strain and a second bacterial strain,
[0506] wherein said first bacterial strain and said second bacterial strain are different from one another,
[0507] wherein said bacterial population comprises Bifidobacterium sp. or Vertebrate-Associated Lactobacillaceae,
[0508] wherein said first bacterial strain is configured to utilize a metabolite derived from said second bacterial strain as a growth promoter, and
[0509] wherein said metabolite is not a butyrate, a vitamin B12, or an ammonia (NH3).
   Embodiment 136. The pharmaceutical composition of embodiment 135, wherein said metabolite is a secreted metabolite derived from said bacterial strain.
   Embodiment 137. The pharmaceutical composition of embodiment 135 or 136, wherein said metabolite is not a derivative or a combination of said butyrate, said vitamin B12, or said NH3.
   Embodiment 138. The pharmaceutical composition of any one of embodiments 135-137, wherein said pharmaceutical composition is formulated in an enteral dosage form, an injectable dosage form, a parenteral dosage form, a topical dosage form, or a combination thereof.
   Embodiment 139. The pharmaceutical composition of embodiment 138, wherein said enteral dosage form comprises an oral dosage form, an intragastric dosage form, or a rectal dosage form.
   Embodiment 140. The pharmaceutical composition of embodiment 139, wherein said intragastric dosage form comprises a dosage form that is configured to pass through a feeding tube.
   Embodiment 141. The pharmaceutical composition of any one of embodiments 135-140, wherein said Vertebrate-Associated Lactobacillaceae comprises Vertebrate-Associated Lactobacillaceae, LimosiVertebrate-Associated Lactobacillaceae, LigiVertebrate-Associated Lactobacillaceae, Lacticaseibacillus sp., or a combination thereof.
   Embodiment 142. The pharmaceutical composition of any one of embodiments 135-141, wherein said Vertebrate-Associated Lactobacillaceae comprises Lactobacillus crispatus, Lactobacillus gasseri, Limosilactobacillus vaginalis, Limosilactobacillus fermentum, Lactobacillus plantarum, Lactobacillus jensenii, Lacticaseibacillus paracasei, or a combination thereof.
   Embodiment 143. The pharmaceutical composition of any one of embodiments 135-142, wherein said Bifidobacterium sp. comprises B. animalis, B. pseudocatenulatum, B. bifidum, B. breve, B. dentium, B. faecale, B. longum, or a combination thereof.
   Embodiment 144. The pharmaceutical composition of any one of embodiments 135-143, wherein said first bacterial strain comprises said Bifidobacterium sp. or said Vertebrate-Associated Lactobacillaceae.
   Embodiment 145. The pharmaceutical composition of embodiment 144, wherein said first bacterial strain comprises said Bifidobacterium sp.
   Embodiment 146. The pharmaceutical composition of embodiment 144, wherein said first bacterial strain comprises said Vertebrate-Associated Lactobacillaceae.
   Embodiment 147. The pharmaceutical composition of any one of embodiments 135-146, wherein said second bacterial strain comprises said Bifidobacterium sp. or said Vertebrate-Associated Lactobacillaceae.
   Embodiment 148. The pharmaceutical composition of embodiment 147, wherein said second bacterial strain comprises said Bifidobacterium sp.
   Embodiment 149. The pharmaceutical composition of embodiment 147, wherein said second bacterial strain comprises said Vertebrate-Associated Lactobacillaceae.
   Embodiment 150. The pharmaceutical composition of any one of embodiments 135-149, wherein said growth promoter comprises fructooligosaccharides (FOS), guar gum, corn syrup, polydextrose, Galacto-Oligosaccharides (GOS), lactose, inulin, mucin, sialic acid, glucan, fructose, N-Acetylglucosamine (GlcNAc), mannose, Lacto-N-neotetraose (LNnT), glucose, 2′-Fucosyllactose (2′-FL), galactose, fructose, pectin, starch, or a combination thereof.
   Embodiment 151. The pharmaceutical composition of embodiment 150, wherein said starch comprises a modified starch.
   Embodiment 152. The pharmaceutical composition of embodiment 151, wherein said starch comprises a fermented starch.
   Embodiment 153. The pharmaceutical composition of embodiment 152, wherein said fermented starch comprises a dextrin.
   Embodiment 154. The pharmaceutical composition of embodiment 153, wherein said dextrin comprises a maltodextrin.
   Embodiment 155. The pharmaceutical composition of any one of embodiments 135-154, wherein said pharmaceutical composition further comprises a pharmaceutically acceptable excipient, a cryoprotectant, or a combination thereof.
   Embodiment 156. The pharmaceutical composition of em any one of embodiments 135-155, wherein said pharmaceutical composition further comprises Akkermansia sp., Anaerbutyricum sp., Anaerostipes sp., Anaerotignum sp., Bacillus sp., Bacteroides sp., Blautia sp., ClostridiumCollinsella sp., Coprococcus sp., Dorea sp., Enterococcus sp., Erysipelatoclostridium sp., Escherichia sp., Eubacterium sp., Faecalibacterium sp., Faecalicatena sp., Holdemanella sp., Lachnospira sp., Longibaculum sp., Paraprevotella sp., Parabacteroides sp., Pediococcus sp., Roseburia sp., Ruminococcus sp., Veillonella sp., or a combination thereof.
   Embodiment 157. A pharmaceutical composition comprising a bacterial population comprising at least one strain of Bifidobacterium sp. or Vertebrate-Associated Lactobacillaceae,
[0510] wherein said bacterial population, when present within a medium comprising sialic acid, does not exhibit a growth of at least about 105% by weight as compared to a growth of a reference bacterial population when present within a medium comprising glucose.
   Embodiment 158. The pharmaceutical composition of embodiment 157, wherein said bacterial population, when present within said medium comprising said sialic acid, does not exhibit said growth of at least about 105% by weight as compared to said growth of said reference bacterial population when present within said medium comprising said glucose as a carbon source.
   Embodiment 159. The pharmaceutical composition of embodiment 158, wherein said bacterial population, when present within said medium comprising said sialic acid, does not exhibit said growth of at least about 105% by weight as compared to said growth of said reference bacterial population when present within said medium comprising said glucose as a sole carbon source.
   Embodiment 160. The pharmaceutical composition of any one of embodiments 157-159, wherein said bacterial population, when present within said medium comprising said sialic acid, does not exhibit a growth of at least about 120% by weight as compared to said growth of said reference bacterial population when present within said medium comprising said glucose.
   Embodiment 161. The pharmaceutical composition of embodiment 160, wherein said bacterial population, when present within said medium comprising said sialic acid, does not exhibit a growth of at least about 150% by weight as compared to said growth of said reference bacterial population when present within said medium comprising said glucose.
   Embodiment 162. The pharmaceutical composition of embodiment 161, wherein said bacterial population, when present within said medium comprising said sialic acid, does not exhibit a growth of at least about 1000% by weight as compared to said growth of said reference bacterial population when present within said medium comprising said glucose.
   Embodiment 163. The pharmaceutical composition of any one of embodiments 157-162, wherein said pharmaceutical composition is formulated in an enteral dosage form, an injectable dosage form, a parenteral dosage form, a topical dosage form, or a combination thereof.
   Embodiment 164. The pharmaceutical composition of embodiment 163, wherein said enteral dosage form comprises an oral dosage form, an intragastric dosage form, or a rectal dosage form.
   Embodiment 165. The pharmaceutical composition of embodiment 164, wherein said intragastric dosage form comprises a dosage form that is configured to pass through a feeding tube.
   Embodiment 166. The pharmaceutical composition of any one of embodiments 157-165, wherein said Vertebrate-Associated Lactobacillaceae comprises Vertebrate-Associated Lactobacillaceae, LimosiVertebrate-Associated Lactobacillaceae, LigiVertebrate-Associated Lactobacillaceae, Lacticaseibacillus sp., or a combination thereof.
   Embodiment 167. The pharmaceutical composition of any one of embodiments 157-166, wherein said Vertebrate-Associated Lactobacillaceae comprises Lactobacillus crispatus, Lactobacillus gasseri, Limosilactobacillus vaginalis, Limosilactobacillus fermentum, Lactobacillus plantarum, Lactobacillus jensenii, Lacticaseibacillus paracasei, or a combination thereof.
   Embodiment 168. The pharmaceutical composition of any one of embodiments 157-167, wherein said Bifidobacterium sp. comprises B. animalis, B. pseudocatenulatum, B. bifidum, B. breve, B. dentium, B. faecale, B. longum, or a combination thereof.
   Embodiment 169. The pharmaceutical composition of any one of embodiments 157-168, wherein said first bacterial strain comprises said Bifidobacterium sp. or said Vertebrate-Associated Lactobacillaceae.
   Embodiment 170. The pharmaceutical composition of embodiment 169, wherein said first bacterial strain comprises said Bifidobacterium sp.
   Embodiment 171. The pharmaceutical composition of embodiment 169, wherein said first bacterial strain comprises said Vertebrate-Associated Lactobacillaceae.
   Embodiment 172. The pharmaceutical composition of any one of embodiments 157-171, wherein second bacterial strain comprises said Bifidobacterium sp. or said Vertebrate-Associated Lactobacillaceae.
   Embodiment 173. The pharmaceutical composition of embodiment 172, wherein said second bacterial strain comprises said Bifidobacterium sp.
   Embodiment 174. The pharmaceutical composition of embodiment 172, wherein said second bacterial strain comprises said Vertebrate-Associated Lactobacillaceae.
   Embodiment 175. The pharmaceutical composition of any one of embodiments 157-174, wherein said energy source comprises fructooligosaccharides (FOS), guar gum, corn syrup, polydextrose, Galacto-Oligosaccharides (GOS), lactose, inulin, mucin, sialic acid, glucan, fructose, N-Acetylglucosamine (GlcNAc), mannose, Lacto-N-neotetraose (LNnT), glucose, 2′-Fucosyllactose (2′-FL), galactose, fructose, pectin, starch, or a combination thereof.
   Embodiment 176. The pharmaceutical composition of embodiment 175, wherein said starch comprises a modified starch.
   Embodiment 177. The pharmaceutical composition of embodiment 176, wherein said starch comprises a fermented starch.
   Embodiment 178. The pharmaceutical composition of embodiment 177, wherein said fermented starch comprises a dextrin.
   Embodiment 179. The pharmaceutical composition of embodiment 178, wherein said dextrin comprises a maltodextrin.
   Embodiment 180. The pharmaceutical composition of any one of embodiments 157-179, wherein said pharmaceutical composition further comprises a pharmaceutically acceptable excipient, a cryoprotectant, or a combination thereof.
   Embodiment 181. The pharmaceutical composition of any one of embodiments 157-180, wherein said pharmaceutical composition further comprises Akkermansia sp., Anaerbutyricum sp., Anaerostipes sp., Anaerotignum sp., Bacillus sp., Bacteroides sp., Blautia sp., ClostridiumCollinsella sp., Coprococcus sp., Dorea sp., Enterococcus sp., Erysipelatoclostridium sp., Escherichia sp., Eubacterium sp., Faecalibacterium sp., Faecalicatena sp., Holdemanella sp., Lachnospira sp., Longibaculum sp., Paraprevotella sp., Parabacteroides sp., Pediococcus sp., Roseburia sp., Ruminococcus sp., Veillonella sp., or a combination thereof.
   Embodiment 182. A method, comprising administering the pharmaceutical composition of any one of embodiments 1-181 to a subject.
   Embodiment 183. The method of embodiment 182, wherein said subject has bacterial vaginosis BV or necrotizing enterocolitis (NEC) or a risk of said BV or a risk of said NEC.
   Embodiment 184. The method of embodiment 183, wherein said subject has said BV or said risk of said BV.
   Embodiment 185. The method of embodiment 184, wherein said subject has said BV.
   Embodiment 186. The method of embodiment 184, wherein said subject has said risk of BV.
   Embodiment 187. The method of embodiment 184, wherein said subject is at least about 10 years old.
   Embodiment 188. The method of embodiment 187, wherein said subject is at least about 15 years old.
   Embodiment 189. The method of embodiment 187, wherein said subject is at most about 120 years old.
   Embodiment 190. The method of embodiment 183, wherein said subject has said NEC or said risk of said NEC.
   Embodiment 191. The method of embodiment 190, wherein said subject has said NEC.
   Embodiment 192. The method of embodiment 190, wherein said subject has said risk of said NEC.
   Embodiment 193. The method of embodiment 190, wherein said subject is at most about 1 year old.
   Embodiment 194. The method of embodiment 193, wherein said subject is at least about 1 day old.
   Embodiment 195. The method of embodiment 190, wherein said subject is a premature infant.
   Embodiment 196. The method of embodiment 182, wherein said subject has a microbial dysbiosis.
   Embodiment 197. The method of embodiment 196, wherein said subject has said microbial dysbiosis in a gastrointestinal (GI) tract or vagina of said subject.
   Embodiment 198. The method of embodiment 197, wherein said subject has said microbial dysbiosis in said GI tract of said subject.
   Embodiment 199. The method of embodiment 197, wherein said subject has said microbial dysbiosis in said vagina of said subject.
   Embodiment 200. A method, comprising:
[0511] (a) providing a plurality of bacterial strains;
[0512] (b) culturing a given bacterial strain of said plurality of bacterial strains in a carbon source or a plurality of carbon sources;
[0513] (c) measuring growth of said plurality of bacterial strains; and
[0514] (d) selecting a bacterial strain of said plurality of bacterial strains,
   wherein said plurality of bacterial strains comprises Bifidobacterium sp. or Vertebrate-Associated Lactobacillaceae, wherein said bacterial strain, when present within a medium comprising said carbon source and a second bacterial strain or a supernatant of said medium comprising said carbon source and said second bacterial strain, exhibits a growth of at least about 105% by weight as compared to a growth of said first bacterial strain when present within a medium comprising said carbon source in an absence of said second bacterial strain or said supernatant of said medium comprising said carbon source and said second bacterial strain, and
[0515] wherein said carbon source does not comprise starch.
   Embodiment 201. The method of embodiment 200, wherein said supernatant of said medium comprising said carbon source and said second bacterial strain is cell-free.
   Embodiment 202. The method of embodiment 200 or 201, wherein said supernatant of said medium comprising said carbon source and said second bacterial strain comprises a fermentation product derived from said second bacterial strain.
   Embodiment 203. A method, comprising:
[0516] (a) providing a plurality of bacterial strains;
[0517] (b) culturing a given bacterial strain of said plurality of bacterial strains in a carbon source of a plurality of carbon sources;
[0518] (c) measuring growth of said plurality of bacterial strains;
[0519] (d) selecting a bacterial strain of said plurality of bacterial strains,
   wherein said plurality of bacterial strains comprises Bifidobacterium sp. or Vertebrate-Associated Lactobacillaceae, wherein said bacterial strain, when present within a medium comprising a secreted metabolite derived from a second bacterial strain, proliferates for at least about 10 cell divisions.
   Embodiment 204. The method of embodiment 203, wherein said medium comprising said secreted metabolite derived from said second bacterial strain comprises a supernatant derived from a growth culture of said second bacterial strain.
   Embodiment 205. The method of embodiment 204, wherein said supernatant derived from said growth culture of said second bacterial strain is cell-free.
   Embodiment 206. A method, comprising:
[0520] (a) providing a plurality of bacterial strains;
[0521] (b) culturing a given bacterial strain of said plurality of bacterial strains in a carbon source of a plurality of carbon sources;
[0522] (c) measuring growth of said plurality of bacterial strains; and
[0523] (d) selecting a bacterial strain of said plurality of bacterial strains,
   wherein said plurality of bacterial strains comprises Bifidobacterium sp. or Vertebrate-Associated Lactobacillaceae, wherein said bacterial strain, when present within a medium comprising a secreted metabolite derived from said second bacterial strain and a layer of epithelial cells, decreases permeability of said layer of epithelial cells by at least about 5%, as compared to permeability of a layer of epithelial cells present within a medium comprising said bacterial strain in an absence of said secreted metabolite, and
[0524] wherein said permeability of said layer of epithelial cells is measured by transport of a Fluorescein isothiocyanate (FITC)-conjugated dextran or by transepithelial electrical resistance across said layer of epithelial cells.
   Embodiment 207. The method of embodiment 206, wherein said medium comprising said secreted metabolite derived from said second bacterial strain comprises a supernatant derived from a growth culture of said second bacterial strain.
   Embodiment 208. The method of embodiment 207, wherein said supernatant derived from said growth culture of said second bacterial strain is cell-free.
   Embodiment 209. The method of any one of embodiments 206-208, wherein said secreted metabolite derived from said second bacterial strain comprises a fermentation product derived from said second bacterial strain.
   Embodiment 210. The method of any one of embodiments 206-209, wherein said epithelial cells comprise mammalian epithelial cells.
   Embodiment 211. The method of embodiment 210, wherein said mammalian epithelial cells comprises human epithelial cells.
   Embodiment 212. A method, comprising:
[0525] (a) providing a plurality of bacterial strains;
[0526] (b) culturing a given bacterial strain of said plurality of bacterial strains in a carbon source of a plurality of carbon sources;
[0527] (c) measuring growth of said plurality of bacterial strains; and
[0528] (d) selecting a bacterial strain of said plurality of bacterial strains,
[0529] wherein said plurality of bacterial strains comprises Bifidobacterium sp. or Vertebrate-Associated Lactobacillaceae, wherein a secreted metabolite or an inviable cell derived from said bacterial strain, when combined with an engineered cell comprising a reporter, decreases a signal of said reporter by at least about 5% as compared to a signal of said reporter when said engineered cell is not combined with said metabolite or said inviable cell derived from said bacterial strain.
   Embodiment 213. The method of embodiment 212, wherein said medium comprising said secreted metabolite or said inviable cells derived from said second bacterial strain comprises a supernatant derived from a growth culture of said second bacterial strain.
   Embodiment 214. The method of embodiment 213, wherein said supernatant derived from said growth culture of said second bacterial strain is cell-free.
   Embodiment 215. The method of any one of embodiments 212-214, wherein said medium comprising said secreted metabolite or said inviable cells derived from said second bacterial strain comprises a fermentation product derived from a growth culture of said second bacterial strain.
   Embodiment 216. The method of any one of embodiments 212-215, wherein said secreted metabolite derived from said second bacterial strain comprises a fermentation product derived from said second bacterial strain.
   Embodiment 217. The method of any one of embodiments 212-216, wherein said engineered cell comprises a macrophage.
   Embodiment 218. The method of any one of embodiments 212-217, wherein said inviable cell comprises a pasteurized cell.
   Embodiment 219. The method of any one of embodiments 212-218, wherein said reporter comprises a nuclear factor kappa-light-chain-enhancer of activated B cells (NFkB) reporter or an interferon-sensitive response element reporter (ISRE).
   Embodiment 220. The method of embodiment 219, wherein said NFkB reporter comprises a secreted embryonic alkaline phosphatase (SEAP) reporter.
   Embodiment 221. The method of embodiment 219 or 220, wherein said ISRE reporter comprises a Lucia luciferase.
   Embodiment 222. A method, comprising:
[0530] (a) providing a plurality of bacterial strains;
[0531] (b) culturing a given bacterial strain of said plurality of bacterial strains in a carbon source of a plurality of carbon sources;
[0532] (c) measuring growth of said plurality of bacterial strains; and
[0533] (d) selecting a bacterial strain of said plurality of bacterial strains,
[0534] wherein said plurality of bacterial strains comprises Bifidobacterium sp. or Vertebrate-Associated Lactobacillaceae, wherein said bacterial strain, when present within a medium comprising said second bacterial strain or a supernatant thereof for at most about 15 hours, exhibits a growth of at least about 105% by colony-forming unit (CFU) as compared to a growth of said bacterial strain when present within a medium not comprising said second bacterial strain or said supernatant thereof for at most about 15 hours.
   Embodiment 223. The method of embodiment 222, wherein said medium comprising said second bacterial strain or said supernatant thereof comprises a secreted metabolite derived from said second bacterial strain.
   Embodiment 224. The method of embodiment 223, wherein said secreted metabolite derived from said second bacterial strain comprises a fermentation product of derived from said second bacterial strain.
   Embodiment 225. The method of any one of embodiments 222-224, wherein said supernatant of said medium comprising said second bacterial strain is cell-free.
   Embodiment 226. A method, comprising:
[0535] (a) providing a plurality of bacterial strains;
[0536] (b) culturing a given bacterial strain of said plurality of bacterial strains in a carbon source of a plurality of carbon sources;
[0537] (c) measuring growth of said plurality of bacterial strains; and
[0538] (d) selecting a bacterial strain of said plurality of bacterial strains,
[0539] wherein said plurality of bacterial strains comprises Bifidobacterium sp. or Vertebrate-Associated Lactobacillaceae, wherein said first bacterial strain is configured to utilize a metabolite derived from said second bacterial strain as a growth promoter, and
[0540] wherein said metabolite is not a butyrate, a vitamin B12, or an ammonia (NH3).
   Embodiment 227. The method of embodiment 226, wherein said metabolite is a secreted metabolite derived from said second bacterial strain.
   Embodiment 228. The method of embodiment 226 or 227, wherein said metabolite is not a derivative or a combination of said butyrate, said vitamin B12, or said NH3.
   Embodiment 229. A method, comprising:
[0541] (a) providing a plurality of bacterial strains;
[0542] (b) culturing a given bacterial strain of said plurality of bacterial strains in a carbon source of a plurality of carbon sources;
[0543] (c) measuring growth of said plurality of bacterial strains;
[0544] (d) selecting a bacterial strain of said plurality of bacterial strains,
   wherein said plurality of bacterial strains comprises Bifidobacterium sp. or Vertebrate-Associated Lactobacillaceae, wherein said bacterial strain is incapable of using sialic acid as said carbon source.
   Embodiment 230. The method of embodiment 229, wherein said bacterial population, when present within said medium comprising said sialic acid, does not exhibit a growth of at least about 105% by weight as compared to said growth of a reference bacterial population when present within said medium comprising glucose as a carbon source for said reference bacterial population.
   Embodiment 231. The method of embodiment 230, wherein said bacterial population, when present within said medium comprising said sialic acid, does not exhibit a growth of at least about 105% by weight as compared to said growth of said reference bacterial population when present within said medium comprising said glucose as a sole carbon source for said reference bacterial population.

1.-240. (canceled)

241. A composition comprising:
a bacterial population comprising a first bacterial strain and a second bacterial strain different from said first bacterial strain, wherein said bacterial population is for use in treating a disease or disease condition in a subject in need thereof,
wherein said first bacterial strain and said second bacterial strain comprise Bifidobacterium sp. or Vertebrate-Associated Lactobacillaceae, and
wherein said composition is configured to treat said disease or disease condition at least in part by:
(1) inhibiting a growth of a pathogen in said subject by at least 0.1%, relative to a growth of said pathogen in said subject when inhibited by a control composition comprising a control bacterial population that does not comprise said first bacterial strain and said second bacterial strain;
(2) inhibiting a biofilm formation of said pathogen in said subject by at least 0.1%, relative to a biofilm formation of said pathogen in said subject when inhibited by said control composition;
(3) inhibiting an immune response signaling pathway of a cell of said subject by at least 0.1%, relative to said immune response signaling pathway of said cell of said subject when inhibited by said control composition; or
(4) any combinations of (1)-(3).

242. The composition of claim 241, wherein said composition is configured to treat said disease or disease condition at least in part by inhibiting said growth of said pathogen in said subject by at least 0.1%, relative to said growth of said pathogen in said subject when inhibited by said control composition.

243. The composition of claim 241, wherein said disease or disease condition comprises an infant gastrointestinal disease.

244. The composition of claim 243, wherein said infant gastrointestinal disease comprises necrotizing enterocolitis (NEC).

245. The composition of claim 241, wherein said pathogen comprises E. coli, K. pneumoniae, C. perfringens, S. aureus, S. flexneri, or a combination thereof.

246. The composition of claim 241, wherein said composition is configured to inhibit said immune response signaling pathway of said cell of said subject by at least 0.1%, relative to said immune response signaling pathway of said cell of said subject when inhibited by said control composition.

247. The composition of claim 246, wherein said immune response signaling pathway comprises an inflammatory immune response signaling pathway, an innate immune response signaling pathway, or a combination thereof.

248. The composition of claim 241, wherein said bacterial population comprises Bifidobacterium bifidum, Bifidobacterium adolescentis, Bifidobacterium breve, Bifidobacterium longum, Bifidobacterium pseudocatenulatum, Lactobacillus plantarum, Lactobacillus rhamnosus, or a combination thereof.

249. The composition of claim 241, wherein said bacterial population comprises at least two of Bifidobacterium longum, Bifidobacterium bifidum, Bifidobacterium breve, or Lactobacillus plantarum.

250. The composition of claim 241, wherein said bacterial population comprises (1) Bifidobacterium longum, Bifidobacterium bifidum, and Lactobacillus plantarum or (2) Bifidobacterium longum, Bifidobacterium bifidum and Bifidobacterium breve.

251. The composition of claim 241, wherein said composition is formulated in a solid or liquid dosage form.

252. The composition of claim 241, wherein said disease or disease condition comprises a vaginal disease or a complication associated with said vaginal disease.

253. The composition of claim 252, (1) wherein said vaginal disease comprises bacterial vaginosis (BV), recurrent BV, or a combination thereof; or (2) wherein said complication associated with said vaginal disease comprises preterm birth, pelvic inflammatory disease (PID), vulvovaginitis, sexually transmitted infections (STIs), or a combination thereof.

254. The composition of claim 241, wherein said composition is configured to treat said disease or disease condition at least in part by:
inhibiting said biofilm formation of said pathogen in said subject by at least 0.1%, relative to said biofilm formation of said pathogen in said subject when inhibited by said control composition.

255. The composition of claim 241, wherein said pathogen comprises Prevotella bivia, Atopobium vaginae, Sneathia spp., G. vaginalis, L. iners, or a combination thereof

256. The composition of claim 241, wherein bacterial population comprises Lactobacillus jensenii, Lactobacillus gasseri, Lactobacillus crispatus, or a combination thereof.

257. The composition of claim 241, wherein said bacterial population comprises at least two of Lactobacillus jensenii, Lactobacillus gasseri, or Lactobacillus crispatus.

258. The composition of claim 241, wherein said bacterial population comprises Lactobacillus jensenii and Lactobacillus crispatus.

259. The composition of claim 241, wherein said composition is formulated in a vaginal dosage form.

260. A method of treating a disease or disease condition in a subject in need thereof, comprising:
administering to said subject a therapeutically-effective amount of a composition, wherein said composition comprises a bacterial population comprising a first bacterial strain and a second bacterial strain different from said first bacterial strain,
wherein said first bacterial strain and said second bacterial strain comprise Bifidobacterium sp. or Vertebrate-Associated Lactobacillaceae, and
wherein said composition:
(1) inhibits a growth of a pathogen in said subject by at least 0.1%, relative to a growth of said pathogen in said subject when inhibited by a control composition not comprising said first bacterial strain and said second bacterial strain;
(2) inhibits a biofilm formation of said pathogen in said subject by at least 0.1%, relative to a biofilm formation of said pathogen in said subject when inhibited by said control composition;
(3) inhibits an immune response signaling pathway of a cell of said subject by at least 0.1%, relative to said immune response signaling pathway of said cell of said subject when inhibited by said control composition; or
(4) any combinations of (1)-(3).

The application's sequence listing, which the Patent Office published only in electronic form, follows.

SEQUENCE LISTING (30 sequences)

SEQ ID NO: 1 - DNA, 2459481 bp, Lactobacillus crispatus
  source 1..2459481: mol_type = genomic DNA
ttgttcgacattaataaattttgggaacactttaatgacgagatgcgtgctcgtttcaacgaagttgcctacaatgcatggttcaaaaatactaaacctatttcatataatggaaaaacacatgaattaaaaattttagttcaaaatcctgtttctaaaggttactgggaaaagaatctatcttctcaattgattcaatctgcctacggttatgccgacatcgagatcttacctgtatttaaaatatctgaagatgcggatattacagaaaggatcgtaacacctgcgccaaagcgtgaagcgcaagttcaacagcctaatttgccagaaaaagaattcactaaagacttgaagttaaacgaaaaatacacttttgataacttcgttcaaggtgagggaaacaagttggccgccggtgctgcacttgctgtagccgacagtcctggtagtttttacaatcctttatttatttttggtggcgttggtttaggtaaaacacacctgatgcaagctgttgggcatcaaatgctagcagagcgacctaacgcaaaagttgtctatatacagagtgaaacttttgttaatgacttcattaattccatcaaaaataaaacgcaggacaaattccgcgaaaaatacagaacttgtgacctgcttttagttgatgatattcaattttttgcaaaaaaagaggggattcaagaggaattcttccatacttttgagacactttataacgatcaaaaacagatcgtaatgactagcgatcggttgcctacagaaatcccagatctatcagagcgtttagtttctcgatttacatggggcttgcaagtcgaaattacgcctcccgatttggaaaccagaatcgctattttgcgacgcaaagctgaaacagaaggttggactatcgatgatggtacgcttaactatattgcatctcaagttgatactaatattagagaacttgaaggggctttagttaaagttcaagcttatgccacaattgaaaaagcagatattgacgttaaccttgcgcgtgaagcattagttgacctcaaattagttcaaaaaaatcgtggattacaaatctctaaaatacaggaggttgtcgcaaactatttccaaacttcaactgctgaattaaagggtaaaaagcgtgtacggcagattgtagttcctcggcaaatagcaatgtatctttctcgtgaattaacagatgccagtttgccaaaaattggtcaagaatttgggggaaaagatcataccactgtcatgcatgcttatgataaaatcgacaagcagatgaaacttgattctgatatcaaaactgctgtctttgacctaaagcaaattttggagcactaaaagttatccactgtggaaaaataaacaagttttacacaagtttttaaccgtaacaagtccgttattttaggcttcttatgagttttcaacagaactcacaggccctactactactaattaattatataattactaataaagagaaatcacacagctattcttgggaggaaaaacatgaagtttacaattaatcgcaatctgtttatcgaaaacctcaataatgtaatgcgggccatctcatcaagagctactattccaattcttagtggaattaagttagacttaacagaagataaacttacgctaaccggtagtgatacagatatttcaattgaaattcaaattccagtcaatgatgatttaaatgtggaatctacaggttctattgttttaccagctagattctttagtgaaatcgtaaaaaaattgcctggtaaagacttctcatttgaagtaaaagaaagttttcaaactcagatcatatctgaaaatagtgaatttacaattaatggtttagatgctaataactatccacgtttaccagaaatttcagatgctgcttcattcactatttctggtaaaactttccgtgaaatcattaatgaaacgcaatttgctacttccaatgatcaaacacgagcaattttaactggggtacgtttcttctttagtccagataaaattaaagctgtcgcaactgattcccaccgtttatctcaaagaacaattgctttagaaaacggacctcaagctgaaactgatttgattattcctggtaaaagtttgcaggaattagctagaatcattggtgaagctgatccagaagttaaagtttgcccaggtgataaccaagctttatttgtaattggcaacttgtccttctattcacgtcttttggacggaaattatccagacactgatcgcttgattccgactgaaaagaccactagtgttgaatttgacatttccgaattatctagtgcccttgaacgtgccagtttgttaactcatgctggccgtaacaacgtggttactttgactttagatgtagaaaatcaatcagctaagttatcaggtaaatctgcggaaattggtaatgttgaagaagatgttagcttcagaaatcttgaaggaaacaatttagagatttccttcaaccctgactatatgcgtgatgcgttaagagcttcagtaacagattctgtaattatgagttttactaagccacttcgtccatttatcattaatccagataaagaagacattgaatttgtgcaattaattacgccagttagaacatattaatcaagtacacaatatttaggtcataaaaagtcgtcaaataaggcgactttttattttgcttttaaacgaaaacgcaaaatattggcgtatatttatttttttaccgtgctagtgtgattaggttattttgaaaaaaagctctgaaaaggcttataagagcgatttagtttgttatttgtgttgaaaactaatataattatataggtataaagcgtattgaaggtgagcattattaagtattttaaagttgacggcgatcatattactttggggcaattcctgaaggaagagagcattatttcatcaggtggacaagctaaatggtacttaaaagataatccagtaactttaaatggtgaacttgaagatcgaagaggcaaaaagatgcatgttggtgatcatatagtggttaatggccaagaatatgagtttcggtagggaagtcaatgtatcttgatcattttactgtacagaattttcgtaatttaaaaaagcttgacgtaaattttgattcaaacgtcaatatttttattggcaaaaatgctcagggcaagaccaatttgctagaggcaatctattttttagcattaacacgttcacataggaccaataatgataaagatttaattggtttcggcggtgagtttaccaatttacttgggcatgtacataaaagccaggtggatcttgatttacgtgttttgatcacccaaaaaggtaaaaaagtatggattaatcgagttgagcaggcgaagttgtctaaatacgtaggtcagctgaatgcgattttattttcaccggaagacctcgagttgatcaagggtgcaccagcactgcggcggagatttatggatcaagaatttggtcaaataaatgcagagtatttatacttcgcaagtaagtatcggcaagttttaattcaaaagaataattatctgaagcagctagctaaaggtaaggcaaaggatcaggtctttttagatgtactttcagatcaactagctggtatcgccgctgaagttgtctttcgacgatttaaatttcttaagtatcttagtcactatgctagcgatgcttatgcacatattagtttaggcagtgagcagctttcaattgcttatcatccatcagtggctgacatccaagctgatgacagtacagaagaaatttatcaaaagattttagcaagttatgcacgaaataaggcaagtgaaattcgcaaggggacaactacttctgggccgcaccgtgatgatattgaatttaaacttgatggtcaaaatgcacatctttatgcttcgcaagggcagcagcgttcaattgcacttagcgtcaagctggcggaaattcaattggtgcatcaactaacagatgagtatcctttactcttgctggatgatgtaatgagcgagttagatcatggtcgacaaagtgcgctacttaattatattcatgggaaaacgcaaacctttattactacgactgacttagaggggatttcctgggaaataattaaaaagccgcgtgtgtatcacattcaatcaggcaaaattagtttggagaaggagaattaaatggctgataattcaaaagaaaatcttgaaaaggtcaaaaaatatgaaaaagaggctgacaagtataatgccagtcaaattcaggttcttggcggtctagaagctgtacgtaagcggccaggtatgtatatcggttcgactagttctcagggattgcaccacttagtgtgggaaattattgataacagtattgatgaacgacttgctggttttgcgaccaagattgaagttacgactaacgaagatggtagtgtcaccgttcaagatgatggacgtgggattcctgtagatattcaagaaaaaacaggtcgtcctgcattagagactgtatttactgtacttcacgccggtggtaaattcggcggtggtggatataaggtttctggtggtttgcacggagttggggcttcagtagttaacgctctgtccactaaacttgatgttaccgtaatgcgtgatggcaaaaagtactttatcgatttcgatcatggccgtgttaaggatgagatgaaacaaattggcacggttccacttgatgaacatgggacgattgttcacttctatccagatccagatattttcacagaaactattgtttttgatgacaagatcttgaagaacagaatccgtgaattggcctttttgaacaagggattaactttaacctttactgacaagcgtaaagacactgccgaaacagatgtgtataagtttgaaggtgggattaaggaatacgttgcctttttgaacaagggacaagaagtattatttgatgatccaatttatgttgaaagcacctataatggcattgatgttgaagtggctttgcaatatacaaatggctataagactactttgatgacttttgccaataatattcacacctatgaaggtgggatgcacgaggccggttttaagactgcgttaacacgtgtggttaatgactatgcacataagtctaagatcttgaaagataaggacgataatctttccggtgaagacattcgtgaaggaatgacagctattgtctcagttaagcaccctagtccgcaatttgaaggtcagactaagaccaagttaggtaattcggatgctagaactgctgtagataaggctttttcagaaacctttagtcgtttcttgatggaaaatccttcagttgggcgcaagatcgtagaaaagggtcaattagccgaacgagctagaactgctgccaagcgtgcacgtgaagtaacaagaaagaaatctggtctggaaattgctaatttaccaggtaagttagccgacaatacaagtaacgatccaagtatttcagaactgtttatcgtcgagggtaactcagccggcggttctgctaagcaaggtagatcacgtttaacacaggctattttgccaatcagaggtaagattttaaatgttgaaaaagcttcgatggatcgaatcttggctaaccaagaaattagatctttattcacagctttaggaacaggctttggtgctgactttgacgtttcaaaagcacgttatcacaaattgattatcatgactgatgccgatgtcgatggtgcccacattagaaccttgctgttgaccttgttctataactatatgcgcccaatgatcgacaagggctatgtttatatcgccaagccacctctataccaagttcgtcaggggaaagtggtcagatatcttgatactgacgaagaattgcatgattacttaggtagcttgcaaccaagtcccaagcctactgtgcaacgttacaaggggttaggtgaaatggacccagagcagttgtgggaaactactatgaatccagaaaatagaagactggatcgggtaagtcctgagtatgctaaagatgctgacgcagtctttgagctcttaatgggaaatgaagtttcaccaagacgtgactttattcaaaagaatgctaaatatgttgaaaacttggatgcataggaggattagatggacgagaatcaaactcaagatcatagaattaaaaacgtcgatctaactagcatgatgcgtagttcatttttggattacgcaatgtcagttattgttgcacgtgctttacctgatgttcgtgatggcttaaagcccgtacaacgtcgtattctttacggtatgagcgagttgggggtaacgcctgataaaccatacaagaagagtgccagaattgttggggaagttatgggtaagtttcacccccatggtgattcctcaatctatcttgctatggcacacatggcacaagatttctcataccgttacatgttagtcgatggtcacggtaacttcggttctgtcgatggtgatgagccagccgcaatgcgttataccgaagcaagaatgagtaaaattgctgtggaaatgttgcgcgatatcaacaaaaacaccattgattggcaaagaaactatgatgataccgaaaatgaaccggttgtcttacctgctagaattcctaacttgcttgttaacggtgctaacgggattgccgttgggatgacaacaaatatcccgccacataacttgactgaagttattagtggtttgcacatgttaatgaaaaatcctgatgctacaaccaaggacttgatgaaagttatcccaggtcccgattttccaactggcggaattattatgggacgtggtggtatctaccgtgcttatgagagtggtaagggtaacattgttgttcgcgccaaaaccaatattgagactgaaaagagcggccgcgagcgcataattgtgagcgaaattccatttatggtaaacaaggctgaattggtgaagaaaattgctgatttggctcgagaaaagactatcgatggaattactggtgtgcgtgatgaatcagaccagacagggatgcggattaccattgatattcgccgtgatgctagtgctagcgttgttttgaataatttattcaagcaaactcaaatgcaggctaactttggtatgaatatggtggctattgttgatggtgcgccacactttttaaccttgaagcaaatgctgcaatattacttggatcaccaagaagatgttgtaactcgcagaacaagattcgagttagctaaggcagaggcaagagcccacatccttgaagggttaagaatcgctctggacaatattgatgaaattgtccacattatccgcaatagtcaatcaagtgacattgctaaagcaactttgattagccgctttggccttgatgataagcaatctcaggctatcttagacatgcgtttggttcgcttgactggcttggagcgcgataaggtagaagctgaatacaaggaattacaagctaaaattgctgactacaaagatattttgtctaagcctgagagaattgaccaaattatctatgacgaattgcttgatattcaaaaacgattcggtgataagcgaagaaccgaaattggtgctagcgaagtcgtttcaattgaagatgaagatttgattgaaaagcaaaatattctgttgacggttacccataacggctatattaagagaatgccaattcaggaatttaagactcaaaaccgtggtggtaaaggtatcaagggaatgggtgtacaagatggcgactttattgagcatttgatttactcaagtacgcacgatctgctcttgttctttactaatgctggtaaggtttactccaagaaagcctatgagattcctgaatacggccgcgcagctaaaggattgccagtagtcaacttattgcaattggaaaagggcgaaaaggtccaaactgtaattaatattccggaaggtgctgacgataattacttattctttgttactaagatgggaactgtaaagcgtacacacgttagcgaattttctaatattagaaacagtggtttaattgccttaactttgaaagatggcgatgaattaagcaatgttttgactactgatggtaagcaaaacatcttaatcgggactcacttgggctacgctgttaccttcaatgaaggcgatgttcgggcaatgggtcgaactgctgctggtgttcgcggaattaacttgcgtgagcatgactatgttgttggttcaggtattttaggtgctgatgaccaagtcttggtaatttctgaaaagggttatggtaaacggactccagcttcagaatatccagttaaaggccgtggcggtaaaggtattaagactgccaatattactgagaagaatggtccattagctggtgtaacaatcattaactcaaataatgatgtgatggtaattactactgacggaattatgattcggtttagaattgatgatgtttcgcaaactggccgtagcaccatgggtgttcgcttgattaaagttagcgatgatagtcaggttgcaagtttaaccgttgttccaactgaggaagaacaagatcaaactggtgacgatgacgactcaaaaaatggataattaattaaaaaaacaaaaaatttgaacttttaaaaaaattatcaaacttttttgcgtaataaataatgagcagtaaaaaatctgctaggatcacgtgaaaacagtttggtaattttttatttatatgctaaaattagaaattgcgagtaatattccattactccttgttcttgattttagcaagaaccatatagtccagaaggaggtgcaatagtcatggcaactacaaagtacgaagtaacttacatcatcaagccagatgttgacgaagacaacaagaaggcagttgtagaaaactacgacaaggttatcgctgataacggtggtactatggtagaatccaaagactggggcaagcgtcgtttcgcatatgaaattgataagtatcgtgaaggtacttaccacattatgactttcactgctgacaacgctgacgcagttaacgaatttagccgtttgtcaaagattgacaacgctatcttacgttcaatgaccgttaagttagataagtaattttaatttattatccgttatgtgatttaggaaaggaaggtacatgagtatgattaatagagttgtacttgttggccgtttaacacgtgatcctgaattacgtactactgggagtggaatctcggttgctacgtttactcttgctgttgaccgtcaatttacaaatagccaaggtgagagaggcgcagatttcgtcagctgtgtaatttggagaaagtcagcagaaaacttctgcaactttacttcaaagggttcattagttggaattgatggccgaattcaaaccagaagttatgataataaagatgggcaaagggtatatgtaaccgaagttgttgttgataacttcgcattgctcgaatcacgcaaggatcgtgaagcccgcggtcaaaatggtggttatacaccaaatagtggaaatgctggcagtcaacctgctaacaatttcccaaataatggcggatcacaaggtaattcacagactaataacaatcaaaataattcacaagatccatttagtggctcaggtgatacgattgatatttctgatgacgatctaccattttaaactaaattaaagaaaggattctagaacatggctcaacaaagaagaggcggccgtcgtcgtcgtaaggttgactacatcgcagctaaccacatcgactacgttgactacaaggatgtcgatctgttgaaacgttttatctcagaaagaggtaagattttaccacgtcgtgttactggcactagtgctaagaaccaacgtaaagtagctaatgcaattaagagagctcgtatcatgggcttgttaccattcgttgctgaagactaatttagatcgaaataaaccaaaaggacaggacacaaggttctgtccttttttcgtataataattaaaaaaattctctcttcgtattgtaccctaagtgtataattttttacggtaagttgaataaataattaaaaaagcccaagtcctttgaatttggacttgagctcaaacaaaaagaccagtagtctgatgttaagaacaaaaaacacattagaagctggtcttttatgaattcaattgtaactgaaatcgcaaatattataaagtctgaagataattatattaagcgtgaaagaaaaataatctgtttcttcttaaacctgattaaggaaatcatggccttggctttagctaaagttgatgatgaaatgattaccaaggttaaagcacagggatatcagattgataagaagaatgagcgctcaatcaatatggcttttggcgaagttaggtatgtcagaagaagatatgtctgcccaggcaaacaagcaaggtatcccttggatgaattaataggctttgacaaatacaagcgctacagtattttagcagtcaaaaacatcttagaagtaagcagcgttgccacttatcgcaatactgctctagcagtcaattgcctgtctggctttaatattagccatatgcaggtgggcaatttggtaaaaatggccgggaaaaatattaaagcgggccaagaagcagattcaagatatgatgccgcaggcactaagaaaaaggtcccagttttgtatcttgaaggcgatggcgtggtgatcaaaggcactaaaagccggttggaatttcatcgctatcaggtctgtgaaggcattgtcaatataagcaagaaacgcagaaagcgaatcaatgccaaggaatttgtttctttaagccgacttgatgcgctgaacgaagccaaggagtacctggccaatacttatgatctttctgatactgtaattcttagcaacgccgatggcggtgctggatatgtcaaaacagacttcgatgacattgtagggctatgcaagcgtcatgagcatttcttggatgtctttcacctaaataagaaaatcaaagaaaggctatattttgcgcctgacctgcaaggcaagctgatttctgctttggaatacaaatacagctatgacaaaactatcctaaccactgcagaaagccgactaattgatgaattgaataccgagctcaatcatgattatctggggcgcctaaagaattatattgatcgtcattgggacgatattaagccgtttaagaaacgaaaactgactgtgactaaagccattggctgctgcgagagcaaccaccgcaagtatacctaccgtgttaaggggcaaggcaagaaatggtcaaaatctggagcagaaggcatgcttaggatcttaagctgcatcaagaatcgagagctggaattttggcttagcagcgagtttgaagattcagaaataactgtattgactgaacaggaattaaaagcagcggcccgtgacagcttaaagaagcgtcatgaagttcatttaggcatccagcatggcgcattaaccgcacaggtagctggcaatagttatttaagcaagctaagcagaaatttaagtcatataaatatttaagaaattaaggttagactaatggtttaaaggctaccgcaaaaacattgacacttactattgtacctactgttttcaatcatgagccggaataaggtataattaacactgatatactatatctattaggaaggatcttcatgaaggattttttacgtaagctagaattgcctgaatttattaaggattcacggctgacagcttctataatcattgcactttctctttcattattgggaagcattattgcgatgattatgaatccattgtttggtttggcaatgcttttagtctttattttgaccgttgcctttgccatctatgggacctatattttagcgggtaatgcaaatagctttgcggttaatttgtcttaccggataaagcgtagtgaacaagaagcaatgattaagatgccgttgggaattttgctttatgattcggatcaccaaattcagtgggttaatccatatctgcaattatatttaaagagtacagatttagtggggcacacaattgaatcagttgaccctgatctgaataagctacttaatgaagcaattgaggcaaaaacagcagaaaatcatctggttgattgggatggtcaccgatttgaaatggtggtccaaaataatttaggcgtaatatatttattggatattacgcgctatgccaaaattgaagataaatataaagctgaacgattggcgattggtcaaattttcatcgataattatgatgagctaagtgaagcaatgcatgatcaagaattgaccagcatgagttcatatgtgcaaaatacattgagtgattatgcgaaaaagtttaacgcatatttaaaacggattgatgaagaccatttcttgatcttgatccatatgcaagaattagctgagatggagaaggacaaattctctgttttagataaggtgcgtcaagaaacgagtagaaacaatacgccacttactttatctatgggaattgcttttgggagtgattctttgtctgaaattgccaaccaggctcaatctaacttggattttgccctaggtcgaggtggagaccaggttgtcttacgtcaacccggtaaagacgcccgcttttatggcggtaagtctaatccgatggaaaagcggactagagttagagcaagaatggtttcacaagcaattagtgaactatttaaagatgccgatcaagtttttgttgttggtcatcagcgtcctgacatggattcagtcggtagtgggattggcgtagtaaaattagctcgtcttcacggagttaaagctaattttgttttagatactaataagacaaactatgatgttggtcgcttggtcaccttaatgcaacagaaaaatcaggataaggatatttttattaaccctgatgtagctttagctcaagttactgacaagtcaatgttggtaatggttgatcattcgaagtattcaattacttactcacgggcactttatgatcgtttgaagaatcgaatcatcgttattgatcaccatagacgaggcgaggaattccctgaaaatccaatgttaacctatgttgaaccatatgcttcttcggcttgtgaattggtcactgaaatgattgaatatcagcagccagctaacggtaagcgagttttgaccgatattgaagctacagcaatgttagctgggattgtggtcgactccaaggaattctcgttgagaacaggaactagaaccttcgatgcggctagctacttacgttcaatcggggctgactcagcagttgtaagcatgctcttgaaagaggatattgatagtttcctcgaacggacgcatttagtagccactttgaagatggtgaagccacatatggccgtattatgtggacctgatgataagattatagatccgatcattacagcgcaggcggctgatactgcacttgatttgggaaatgtgggtgctagtttcgcaattacgcggcgcagtgataatacgattggtatttcagctagatcaatgggtaagatcaacgttcaaattattatggaaaaattgggcggtggtggacatctttctaatgcggcaacacagattaaagatgttactattgaagaagcaaaacaaaaattacttgatgcaattgatgaatatgaaaaagaaaatgattagggaggacaaatatgaaagttatttttactcaagatgttagaggtcgaggtaagcgtggacaagttaaggacgtacctgatggctacgcacaaaattacttgattaagcgaggcttggctaaagaagctactaaaggtaacatgaataccttgaagcgtgtagaagctaatgaaaaggctgcttatgaagcagaaaaggccgaagcagaaaagatcaaggcagaacttgaaaaagacgataccgttgttaacttcaaatctaaggctggtactgactcacgtttgtttggttcaatctcaagtaagaagattgtggaaggccttgaaaagcaatacggtatcaaggttgataaacgcaagcttaacttgccagaaccaattaagactttgggctatactaatgttcatgccaaattatttaagggtgttgaagctactattcgcgttcacgttactgaacaagactaataaaaagtggttgtgattgatggataatatcgtttctcaacaaattccgcatgatcgcgatgccgaaagggcagttctgggtgcgatttttatcgatcctgaagcaattgcggatgctagtgcggtagttcagcctgaagatttctatgagcgggctaatcaaattgtctttcaagcgatgttggacttgtctgatcgcggggatgcaattgatacgctgaccttacaggatgaattaaataaaagaaatcagttagaagatattggtggtatcggttatgtttctgaattagcgatggccacaccgacagcagcgcatgttacctattatgccaaaattgtgcataggaaggcgctgcttcgtcgtttaatctctgctagtcagaagattatctctaatgcaatcgatggctctgacgatgtaacagacattctagatgacgctgaaagtgaaattatgaatgtttcgtcagagaatagcacaggcggctttaggaccattaaagagatcgttaattcagcgattaatgatattaataatattccggatgacggaaatatggttactggcttgccgactggttttgcggaattagataagatgacaactggttttcacgatgatgaattgatcattgtagctgctcgtcctggtgtgggtaagacttcatttgccttaaatattgcgcaaaatgtagggctacacactgaaaaaagtgtagctatgttctcactagaaatgagtggagagcaactggttcagaggatgttagcttctgaaggactgattaattcacagcacttgagaactggccagcttgatgaagaagaatggcgtaaattggtagtggcttctgggtcactagcaggtgcgcaaatctttatcgatgatacgcccggaatcaagatgagtgaaattcgtgctaaatcacggcgattagctaaggaaaagggcaatcttggtcttattgtaattgactacttgcagttgattgagggaccacgtagtgagtcacggcaacaagaagtttcagctatttcacgacaattaaaaaagctagctaaggagcttcatgtgcccgtcattgccctttcgcagctatcacggtcagttgagcagagacaggataaacggcctgtactgtccgatattcgtgaatctggatcaattgaacaagatgccgacattgtttctttcttatatcgggatgattattatcgcgatgagcctaaagatggcgaaagtagtggcagtcaagatgaagttggcgcagaagacgataacggtgaagtagaagtcattattgaaaagaaccgttctggtagtcgggggacagttaaattaatgttctctaagccgtttaaccggttttcaaatttggattatgcacatgatcctaatggcaattaagattaatcaagtgtctgggaaaaaactaagtctcagatcatgaaaaaagaacgttgaatttttgtttcaacgctctttttgtatacttttagctccagccttgatattattaaatcatcacaaaataaaaaaggtggaaactaacatgtacaagaattatatcacaggtcaaactgctttaacacttaatctagattttgccattccggccaatcatttggctaatgccatcagctggtttgtagattcaattccagaagatgttttagtaggcaagactgctaaaacgggccgcccagcctatcatccagccatgatgctcaaaatactgctttttgcttactccagaagagttttttctggcagaaagattgagttgatgctggaagaaaatctgccaatgatgatcttggctgaccagcaaaagatttcatatcatactatcaataattttagatcaagcagccatgccaatgaactgattaaaaagagctttatctacttcactaacctgttagaagatgaaggcttaatcaatgaaggtgctgcttttatcgatggtactaagattgaagctgatgctaaccgctatacatttgtctggcgcaaagcggttgaaaagtatcatgaaaagctgaaaggccaggcagttgaactttatgatgaattgattactaaagaagtagtcaaagaaatggaaaaagaaaaagttcaaactagtcaggggctaaaggaattagctcaagaaactgaagcagaaattaacaagctgactaaagagattgagcaggaaaacaaagccattcctggcggttcacctcgaaaagccaagcgacgtggactaaaaaagattctgcaccggctaagaaaagattatgtgccaagaatgcaaaaatatgaagaagccgaagagatctttgccggacgcaacagttattccaaaacagatcatgacgccacctttatgcatatgaaggaagaccacatgaaaaatggtcaattaaagcctggctacaatattcaagcagtcacgaccgatcaatatgtagttgattatgccatctttcctaatccgacagatttcaaaactttggagccggttttggatcaaatgaccgtgttggacaagtttgacaaaatcgtcgccgatgctggctatggcagtgaatacaattattcgatgctggaggaaaaatatccagacaagaagtactttattccctacactatgtatgaaaaagaacagaccaaaaagtataagaatgatccaactaagctaatcaactggtactacaatgaaaaagatgattattacattgatcatcatggcgtcagattcaatttcaaatattacagccagcgtaaggatcgttctactggtcaggtccgtgattttaaggtttatgaggcagacgagttccagctaacgccagaattggaacaattggctaaaacagctagcggccgccagcgccaagttcgctataatcctaactggcaatatttaaaagaaaaagcaaaagaagttctccaaagcgaagaaggcagacacatctatggcatgagaaaatatgatgtagagccagttttcggacatttgaagaacgtatttggcatgcgcagaacgcacctgcgaggtaaagagaaggtcgaaaccgatatcggaattgcctttatgatgatgaatttgaacaaatattgtcaaagaaggtggctgaagggccgatttttattgttaaaaattttaaagagaacaaaaaaacgatcaagattcttaaaaaaggaaatcttgatcgtttttattcatctggaagctagttttttcccagacacttttttgtacttaaataaaacacaaacaatatttgcatagtattgtactataatttatattttatattgaaagtacacttaatatttgttataactaatattgaaaagatcaaattacgaatatactactcatggaggaatagcgagtttatgaagtttaagaaaattttgcttggtgcgtgtgcagttttagcagtcgtttcactagctgcctgctcaaatagtaagaagagttcatcctcatcgaatgaacctaaggaattgaacgttgaatttgtaccaagtacccaagcaaataagatggaagctaaggccaagcctttaggcacattattgcaaaagcaattacacattccagttcacgtaaccgtttctaccgactatagtgggctggttgaagcaatgtcatctaagaaagttgacgtaggctttatgccaccatattcttacatattagctcataaaaagggaattgctgatgttttattgcaagccgaacgttacggctatgatgaaccatccggtaagatgaatcataccttaatgcataagtatcgtggtatgatcgtggttaagaagggctcaaagatcaaatcttggaaagacttaaagggtaaaaagattgcgattggcgatcctagttcttcatcgggctatgtttatccagttgcggaactttacaaaaagggtttgaatgtaaccaaggactgcaaattagttaatgttaagggtgacgatcaagaagtgttatccgttttgaatggggatgttgatgccgcattcgtcttctcagatgcacgtaatattgccgctaaggatgacaagaaagcaatgaccgatgttgtgccaatctactttaccaagtggattccaaacgatactattgcggttagaaaagatatgcctaaaaaattcagagttaaattagctaaggctttcaagaatattgctaagtctaagaagggtaagcaaattatcgaaagcatttataaccattatggttacgttgaagctaaggattccgactttgatggcttatgtcaataccaaaagattgtgaacaaggctaccggtggtaataattaagattaaaaaagcactcactaagtgctttttttgtattcatgctaagatcagttaaaataaataaaacactaaaagcaaaaatgaaaagagaagaaaaaatatgaaaattgctgttttaactgatagctcagcttatttaactaaagaacaacaagaaaaatatcaaatcgatgttttgccaattccaattatttggggcaaaaaagtatatcatgacttagtcgatattggttatgaagaattttatcaaaaactaaatacagcaaaagagctgccaactacttcgcagccttcaatcggtgatcttaagcagaagattgatgaatacgtggcagcaggctacacggatgttattgtaattactctttcaagtgggatttctagctatttctcaaccgttcagagtgttgcggcagaagaagaccgaatcaaggttcatccattcgatagtaaaattacctgtgctggtgaggcggattatgctatgttggcaggccgtttaatcgaggctggagcggatattgatttgatcatgcatgatcttaaggacctgcaaaaaacgatggatgtgcgctttatggtggacgatttgagccatttgaagcgtacaggtcgtttgtctaatgcggcaagttttgttgggacgctgtttaagattaagccgattttatcgatggatgtgcaaaatgaaggccatatttcagcgattgcgaaagagcgtcaatataaacgtgcatacaagcatgtgcaaaatgattttgataatttgactaaaaatatgccgtataagattcaggacacaatttttgattcacttgatcctgagaaaaaacaggcctggcttgatgattaccgagctaagttccctaagtataagtttgatactagtattatcggccctgttgttggggtgcatgtaggtcaaggtacaatgtcgatgatctggtgccgtgatttggatacttattttgatgaaaatggtcagccaatcaagggaattgagtcacaagcagtagtggatccagagtaagcataataccgatatggcaaaaaaatgagaggcactattgattctttaatatcattgctatattattattaataatttaatatggcgatgaatagggatgatcagagtgtcaatcagttctttttttaaaaagttaatagccaaaaataaactcttgtttttagctatggtgattactagtgcttttgcttctttagatggcgtcatttctccttatgttattgggaaaattactaatacactttctcagaaacattttagtgagataccgaaaatcttgttactgtatctgttgatgatgctttttctgaatgttagcttttatctatggcaattttgttggggaaaaattaccaaatcaagtaatgaattattgagatctacagcttttaataattttattgcttcccctagtgaaaagaaaatcactaataccctgaattttatcaatgttaatgttaaacaaattgaaaatcaatgtattgattcaacaattatgcttgtttactgcgttgagcaagccatcgtttcattagtttatattttaagtattaatggcattgcagcaatggttttcttagtttgtgggttaattccatcagttattccacgtttaactcgtaattgggttcagacaggaactaaaaagtggaatagcagttatgaaaactataatcaaaaaacaagtgatgctgtgtatggttttgatactatcagacatgcaaatggtgataatagattcaaaatatttgtccaaaaagcattaatgggagaagaaaagaagtattttttgatgaattttcggcgtaatacttctaattttttagcccaggtctcttattcattatcaatggttatttctttggctgttggtacattctttgtaattaatggtcaaattctagtaggtggtttgatttctctatttttagcatcagatcgtttaactagtccaattatttcgattgttaatattgcaaatcaattgacctctgttagtcctctgctaaaaaataaagctttacaaaaatctaaaaagcaagaatttaataatttagacttcaccaaattaccaaaccaagagaaaataatttttgatcactgcaatttagggtattctaataaagctattttgaagaatattaatttgacagtttctaaaggcaataaagtattgatcatcggtcgttctggtattggtaaatccactctgttcaagacattgcttaatgaaattccattgctaaagggcaaaatactggtagataatagtcttaaccaagctaatttctataccaattttggtattgttagtcaggatacttatatattcgctgaatctttgcgctttaatttaacgcttggaaaagattttcctactcagcaagtaataaatgttttgaaaactgttaaattaagttatttagctaatgaaaaaagcttagacatgcagatcggggagaagggattatcactttcgggtggagaaaaacgaaaactggaaattgcacgagctttattgaatcaaaaatcgattttacttgttgacgaaggactatctggacttgatgaagaaagcaataaacaaatttttgcacttcttcaaagtcttccgcagacagtaattgaaattgaacatgctgttagtccagaagagaaaaatcaatttgatcaaattattgatctaggagctcagtattgatttttttataaataaacaaaaacaattacatacgtatgaaagcctttacacataaagacttttttatttataatattagcagcacgaaaactttttggagaaaaacttacatacagaaaaggatgagaatatggcagaaaagaaatatgtcggcagtatcgaagcaggcggtactaaatttatcgtagctgtgcaagatgttgaaacaggtaaggaagtagcgcgtgatcgtattcctaccactactaacaaggagactttacaaaagactgctgaatttttcaaaaagcaccccgttgatgcattaggaattggtacttttggtccaattgatatcaatcctaactctcggacttatggttacattttggacacgcctaagccaggttggtcaggtacagatgtgaagggcttctttgaaagaaaattaggtattccagttgccatgacgactgacgttaacgcatcatgttatggtgaatatgttgctcgcggtcgcgatgattctaagagctacttctatgcaacagttggtactggcgttggagctggaattgtgcaagcgggtaagttgctcggtttgaataaccacccagaaatggggcacatgttggttcgtcgttatcctggtgatgattatgaaggccattgcccattccataatgatgcttgtgttgaaggcatgtctgctggtccaagtcttgagggcagaactggtatccctggtgaaaaattgtctcgcgataacaaggtcttcacttattctgcgtattacattgctcaaatgctcttcaatgtttacatggctgctcgtccagatgtaatgattgttggcggttcagttttaaatgaagatgatttggttaaggtaagaaagttctttgatgaatttaacaacaattacgttgccacacccgatttgaatgaattaattgtgcgtcctgctgtggctcacaacgggtctgcaactcttggcgattttgaattagctaagaatttgctcaaataaaaaagcatagataaattgaataagcaataaaaaggctcaactcgttaagaaagacgtaaggcgagccttttttgacgtaatttgacctaaatgcgcgtaatattaattctagaaacgtaaccggtttattaagaaaggagcccaactatgaacaaatcagatagtggcttaaaagacaaagttatcggtaaagtgaaagaagtcgaaggtaaaattaccggcgataaatcacgcgaagtccaaggaaaagctcaacaagccaagggcaaagttaaggacaaagccaaaaaattaaaggatgatctggaaaaagaccatcaaatagatgaagattgttaaagactcaggtcgactagcaatagctaaacagaaagcaaataggtgatcctatgttatcatggatctgggttttaatcgttggcgctataataggtctaatagctggtttcataaccggcaagggcggatcaatgggatttctagctaatttaatagcagggctggttggttcaaccttaggccaagcaatctttggttcgtgggggccgcaaatggctgggatggcaatcgtaccatcaatattgggagccgtcatcttggtactagtggtttcctttgtactagggatgcttagaaaaactgaataaaaatagaataagagaagtgtctgggaaaaaactaacccttagatactgaaagacgatcaatccaactcttaatttgagttgcttgaccgtctttttctgtctatttttatttttgaacaaagaaaattggtcttttgaccatcttctgttccaatatttgcttaaattcatcatcatgaaggctattcctatatctgtttcaaccttctttttgcctcttaaatgagttcggcgcatgccaaagacgttcttcaaatgtccaaaaatcggctccacatcatatttcctcatgctgtagatgtgtctgccttcaggactttggagaactgctttggctttttcttttaggtattgccagttaggattatagcgaacctgacgttggcgtccgctcttagtcttggctaagcgttctaattctggcgttagttgaaattcatctgcttcatagaccttaaaatcacgaacctgaccagtcgatcgatctttacgttgactataatatttgaagttgaatctgacgccattttgatcaaggtaataatcatctttttcatcatagaaccagttagccagcttagtcggatcgttgcgatgctttctggtcttttccttttcgtacatggtataaggaatatagtacttcttgtctgaatactcttcttctaacattgaataattatattcgctgccataaccagcatcagcgacaatcttgtcaaacttgtctagtgtcgtcatctgctttaaaaatggttcgaaagttctgaaatcagttggattagggtataaagcaaagtcaaccacatattgatcagtggtggcagcttgaatattgtagcctggcttgagctggccgttcttcatgtgatcttccttcatatgcatgaaagtcgcgtcatgatctgtcttagaatagctgttacgccctgcaaagatttctttcgcctcttcatatttcttcattcgaggaacatagtcttttcttagtttatgaagcagctttttaagaccgcgtcttcttgcttttctaggcgaaccgccagggattgctttgggttcttgctcaatttcttcggtcagcttttcaatctcggcttccgtttcttgtgctagctctgccaaaccttgactggtctggactttctcttttgccattgctttgacgacttctttggcaatcaattcatcataaagctcaaccgcttgacctttgagcttgtcatgaaatttttcaactgccttgcgccaaacaaaagtatagcgattggcgtcagcttcgattttagtgccatcaataaagatcgctccttcattgataaggccctcggcttctaacaaattggtaaagtagaggaagcttttcttaaccagctcattggcatgcttgctggatctaaagttattgatagtatggtaagaaatctgttggtgttcagccaaagccatcatcggcacgttttcttccagcattaattcgatttttctgcctgaaaatactcttctggaataagcaaaaagcaagattttaagcatcatcgctggatgataagctggacgaccggttttagcagtattacccaataagacatcttctggaattgaatcgacaaaccagctaatggtattagccaaatgattatgaggaatagcgaagtctaagttgagtgttaaagctgtttgacctatggtataattttgatacattaagattgccttctttctttttgttttgtggtgattcaataatatcaaggaaggcacttaaagtatagaaaaagaacgatgaaatccattaggaaatcatcgttcttttttcctgtctgagaattagttttttcccagacactttgtgtttcatgtgaaactattttagcttttttcgttcattttctttctcagctaaaaaacgttgcttaatttcttcaggcaaaagactagggaccgtcttgtcataaaattcaaagaatatgggtgccttgttagagtcattgctcttgggatataaggcaaagtcactttcgctaaacggtaagctgatattaccacgtaaagcattgataatctcaccgaacatatgcaaaacataacggcgcgtctcaggctctaatgacatgattacgcgactgaaacggacagtgcctaataatttatgggcagtaatttgaaaaatatcggtaatatttaattcatcaaatgcttggaaaagagcatcccataattcaccacgttgcttttcagggatgctgtggttaaattcgatgaagaaatgccgcaaagaacgtgcacctgaagtaagtccttctgctagaacaaaactatcacggccaacagaccaacggcgtggatcatgttgctggaccatcggtgcagtgcttttgacgattaaaacgtgttcaggatgatcaagcatggtgccaatgattgaagcttctgggaggtaggtcttcatcttgggtaatgcacgtacaaagccaggtgctttccagacttggtggaaaaagccggggccgtcaaagctaaaggccttgataatacggtcctgcaaatcaggctcagcgacacttaaagcatattcagcgtaattgccacctttagagtgacctgctaaatatattttgtcgtgaggaaattccgcagcaatttcttttaaataatgagcagcaacatcttgcccatagactttaggcatgtagttcatgttcatatcttcgttccagccaattaatgaactgtcagtgccacgatagacaataataattttattgtcagttagtcgaaaagtagcagcggtgaattgcaaaggatatgggtctttttctaggcgattagtccagttaagaatcttaactttgcccaagcgaggtgatttgggcaaaagcagaacttgatcaccagctaaatctttcatttgtacctgaaatgaaggtagtactcgcagtttttcagctacttcgcttagggtgtgtcctttggcagatttgtcgacgggcagataaataatggaggcgaagagagagacatccacactattgaaaggacgctctttaaaagaaagatctccacgccaacgtaaatattcaagtgttccggccataatctcgtcctttctttcacttttagcaataatactattctactagattattgtggcaaaataaaaaatctcaggcgaatgcttgagatctaaacagaattttaaataccaccacgcgtatagctgatgcgcgtaatatctggatacttacgtaagttcatgataattgaattttcgtcaagtttattattgataaccccatcaatgtagaaaactatccgatcatcacttacgtctaaaattttgatagtaatattttcaactttattttctgcaagttcatgtttaattttagacaaaatgtggtgctggttaatagccacaatttgaatgttaaaacgaacatgtggcgttattttgttgataatgacatcatcgtgaaagatcatttgaatgataaacaatagggcggttgataggataccgatgaaatacatgccagcaccaacagccatcccaatggcggcagttgcccaaactccagcggcagtagttaagcctgagacctgttcttttctaactaggattgtacccgcaccaatgaaggaaattcctgtaacgatctgggccgcaattcttgatggatctagtgcaatgtcatgcatgcttaatagatcggtaaatccatatttagatacgatcatgaataaagcagaagcaatcgcaactacgatatgagttctcacacccgcgctttttctctgaatcgcccgctcatagccgattaatgcgccacaaaaagctgcgacaacaattctaagtagccaatctaattcggttgtaattggagctaaagtttgcattatttagtcctcatcctttgtataatcaacaattattatcatttctattttaacgtaaatgcagaaaaattatagtctggggaatttttttgaacttttttcaaaaaagacttgcacagctctcgtctatgtggtttaattaatactgttgtcgggtgagacaacgaagagttgctgacttagctcagttggcagagcacctcactagtaatgaggaggtcggaggttcgaaccctctagtcagcattagttaaacaatttaatagtttttaagtctatcaattaagttcgaaagagcttgatatgataggcttttttgttgtttctagatatttgtgtagatttaaaaatagttatgaatatttagtttcaccacaaaaattgccacacagtttttctagtgtggcatctgtgtggcaaaggttcgattaatgttgtagtggcgggctttattgcttgccatttttttcgttttcaaagtatccatgatttaagaatgactgtcgatactcttttaagatttttatttgatggtctatggcaggaactaacgtatatgcattatttttattgtagaattcatccattaatttagtattcgattccttgtagtccttaatgaaattactatcattttgattcataataatttcttctaactgcatacgaataactaaattaacattattaatcatttcaagatcattggcaccttccaatgattcttcaaattttttatcaaataaaaatttgaatttatctttccaaaaatttattacgtatgatttctttttataatcttcatcatttttagtaaaagaatcagcggtatctttatctccatttatagaaagaaagtgagaaatattatttttcatattactcaattcttcattattatcataatatgctgaaaaaagtaaattaattaacttactctctacttcttcacctctaattccttcgccttttacataagatactggaactttaaatatttctgctaaagctttccatacctcttcatttggaattctgcttcctgcttcgtatcttgctattgttactcgtgtagctgatatgtttttgttctttaaaagattagatagatcttgttgtgtaaaataatttttttctcttagttctttaattcgatttggagtcatattattacctcactaagattaattttatacgattggtacataattagcaaaagtaccaattttggatacaaaagtgttgactacaagaatgaataattgtatattatatgtaaccaaatgtggtacacaaaattataaataaccatttttggaaacaaaaaagaaagagggaatattaaaaatgtccagtaatgtaacaaagcaaggtgaagtactatctaccttcaacgaaagtagtagtaaaagaaccccaattcaatcagcattaacaagaccgttggttgaagcaattggtaagtgttttctattgttgagcggaaccacagaagaagttcaagatcctaatgatgagtctaaaactattccgcgcgcagtatacgaagtaagagttattagctctaaaactagattacctattggaactgtgctaacggtgaaaattaaaggaggtaagagtgtaattactgatgaagagaataagaagttactgttaggcttagagaaaaataaggtagtagcattcgacgatctaagtcattggaactttaacggaaatgagggattatcagcttcaggtatgcgagtattagaagtcagtccgcaagaggctatgaatttatagaaatgaggcggcttatatgaaaataaaaaaattagtcttagataccaaaaacccgttaggcaatcctaacggggtaaaaatggcattaggagtaactttattatcttcaattggtcttgagtataaagttgcacctcaattcataaatgctggtaattataccgcattagcttatccatttttaattaatattatacctctagggtatccatgctggaaatgggttaatctccatatcgttaattataagatctataagcaattgatgaatattgttcattcggaacaattaatagactatggagataaaaaagaaactaccactttcggtgaaagaaaagttgaatatggtgtcaagatcgtctatgaagaaacggcagaaggtacatatattactgtatatcctaatggtataaaacatagcgacgccactcagacgctaaacaataggctagaggaaactttcaacatgaatgttttatcggtagatcatcagctagcttatacgaaatatttattgagaaatgtaaacagacaaagaatggaggtttctaatgataacttctaatttcgtaataaatcttgataagaatacatcattcagttttaaaggtagtggtgggattcttgtcactgggagaagtggctcaggcaagactaataccaccacatatataatgctgaaggcgatgtcccaatgtgattgcggtttatatattattgatgcaaaaagagctgatatgtatggacttcatcaatttttaaaagatggcaagaaggtagtggcaagtacaacaaatcaaatagcacgattgttgcgtgttcttaatgagaacatgagcgcacggtatgagcattttaagaatggaaaatggggacaggatttcgctgaatatggatatagaccatatttattagtcattgatgaagtatctgcgatgttggctggggctggtaagaataagaaagaaataatgggtgaattgcgtcaagttatccttcgtggacgacaagcagggatatttacccttatttcagggcagagaattgatgcaactattttagatcgtgatattaccttacagttaggtacaagaatcgtgatgggacaagcagattcggagacttatcgcatggcttacccaatggtaaatgatattaaagcattaccattagtacctaataagccggggtatggtcttatctattcagatgggcaaaaaattagcaatcctactccatttgtctcaccggatatgtctaacattgatgttccaggggtaattacgaggttagagaataattttgatccatctaaatatattgatgaatcaagctattgggaggtttagtaattgataagttgccagctggcgggcgacagagtcgcacgaatggaatgtccaagcgtgagcgggctggcaacacccaactaataatatgggtgtaacggaaagattattaatcatggaaacgatgaataatattaaaattgatcaacttcgtctaaatattccatatgatgaaatctatcaagtagaaaatagtcaaagtttacccaaagaagttatagtagctgataatctgctgcatctggcatggttgtttaagtctaatacagtgagtcatggacataatggctatacttcttcatataatttcggttcaggagaacaaggcggaaatatttccgtaatgtggaacgagtcaagaaaagatatgggaatactagtcgactttactgcgacaggcaaagcgctatatgaaagccttgctgaattacatggaattcctgttaattggaagaaaataattgaagaattatatgaaaaaatggggcatatatcgaggctagatatagctactgaccttattaattatggtttttcagttaacgaaattattcaaaggttaaagaatgaagaatcatttttcttgaatactcaaggaaataaaatcaatgctaatcgatttaagataattggaagctatagtgaagctcagactctatatatcggtagtagaaaaagtgatgcttttctgagaatttatgataaaaaagttgaacaggatcgagccgatggactctatagaaacttggctagaaactgtaacgattggataagagtagaagcagaatttaaacaccgtttagctaaagaactaggaaaatatattacaacattaactgcagataatatttatccttatttacttggctgtgtactagaacgttggtcattagttgatagggaagaataatgacatatgaaaaattccaatattctaaagaatggaagattttaaaagagttatcgaaaggacaaggacttcaagaactaaaacaagctcaagttgacgcttccctgaatagaaaaattaattggttcttgtatggtggtgccagtggagttattacgttgattaaagaaatttatggtgatgaagcactaaaaaagttttatcaatttttagattattttatttctaatcctgatacgttaggacattactaccactcggacaagataaaggcggatactaaaactattgcagattctacgcaaggcttgaactttggagaatatttagaagacttaaagagagaattagttgagggagataaacagaaaggcaggggctaatatgtttggcacagagttactcaacgctagacaaatagcagaagaattaggtattagctatacttacttttttaaattaattaaaaatgggtgtccttatcatcaacttggagaccaaggacgtaaatattacgttttaaaggaagtacaagagtggctattagtaagtagccaacattaattagaagacgtagcaacttgctacgcttttttaggagaaagctatgtcaattacacaaattaaaacggggaaaaataaaggaaaataccgtgttagaattcaacctactgataatgaaacaggtaaaactattccgattcctagtaaagtaacaaaaactagcagtaagcgtgaagcaaaacaattagaagaacaaatgtgggtgcaatatcgcgcgcataaagaaatgaatttaaatacgcgtggtgctagttaaatcgttctagacaataagccaaattataagctaaaattgcaatttccaaccggctttgaaagcctatcagactacgtgctcgattgttctcggcattgtaataggtcagaagcgaaaagtcgctttcaattgttctgcgaatagccatcaattgatgatcattgtgctttttagctcctgtcatatttttacgatatggtgtccaaagttcataacccatttgttttagctgttgatgcagttctttgcctaaatagccttcgtcgccaagaagatagtaattagatggatgggtattttccatcagttcaactgtctccctggcatcatgaactgatgcttttgttacgacataatcaagaatgtaaccgtcatcgctaacaatgacatgaactttgaaaccatagaagtaaattttcttggtggccttataaccaatgttggcataaccgcgaaaaattttagcacgatagttgcgaattggttggcaaacaggtaccggaaagctgtcaatgatcaagaactgtccattcaggtcaacctttttattcatttcttgccgtatctgataaatcaattgcaatagctgacgtgaacgtcgattaaaacgtgagtgtgataaacaattgaaacattcacagaatcttctttgtgattcaattcctgtcttagcttgccagataagtaaagccaaaatcagactgtccgtagttttaatttgatcaatatttcgccgatgagtaaactcagccggtgcatacaaacgataccagtgccgacaaattatcactaaatctttaaaactaacttgtaaatggtggctaaaacgcttaagcttaaggcagttcaatcagatcagactcttttctattattactatttacaagtcgagtctaacaagattggacttttttattaactaaaacgatttaactagcaccacgcgtatttaaatgtattagatcaaccacttgcaaaagctttagatcactatgtagaagaagaaagaagttcggggcgttggtcatcgattactacgtatgataattggaaatatacggttaagcttgtttctcaatatttcggaaagaaaaaagttaaagatatcaaagaaaaagatatgcgtagttttgctagaaattacataagtacacataaagcaactgtggcacctcattcaacgctagatagacagttacaaaatttaaggagttattttgctactttgaaggaatatggtgtcttaaagaatcctattcctatgaagccattaactaagttttttagacgtgatgaaatgaatgcccctgttaagaaatatgttttcactaataatgaaattaatgttcttaaagatagaatttatagagagcttggagtaacaagaataagttattggacaactagaattgctatcttgatagctctagatactggaatgagacctcaagaaattcaggctttaaagtggagtcaaattactaatgatggaagttttaaagtttttagaataaatgactcatggaatgaaaaagagaagcatcttaacggacatttgaaaagtcgaccgcatggagaatctagactaacccttcccctttctgaaccacttttgcagttattgaataagtttcgtcattgtcagttagaacttttaaaggagaatggtttaactaattttaatgatcgaattttattgaacatcacagattatcacttgtgcgcattagggtatccaataactcaaaaaagtatgaatgatatgttgaaacagttgagtaagaaagtaggggttaataatcaaaatttaaatataagtatgtatacttgtcgtcatactgtagcaacaaaattagggaatacaccaggcatgtcttacccttgggcggcaagcagattagggcattctttaaagatgtttatgcggacatatgtacatgttgatgaagatcgaaatgaagaaatgcttagattgatagctaaaagataaaagaaaaatgcaaaaataacttatatttgataaaaaaatgaattaatgtagtaatagcaagaatttgaaaataataaataacaaataatttttaacattttatagattttgaaaaaaaaagagcgtatactcagggcatcataaagagatgtgaaggagaaatcaaaatggttattgtagaacaaaagtttaataaatataatcatacaagcaacatggatgctatggagtacgctgcaggatgttgcacatgtacaacaacaagttgtacaacttcatgtgccgctgtagctgaaagttaatggatagttggcgctgtaaattatattacagtgctttttttaggagtataaatactgttatgtgtctattaagaataaaagacttaaaagttaattttaaggatcaaacagtactggattttagaggtcatgatatagagataaagtcaggagacaaagtagctctaattggaaaaaatggggcaggaaaaagtacactattaaattgtcttttacatgaagtaaaatacactggctgtataaaggagaagtatcatcagtcggatataggagtagtttttcaagaaaatgtatattttaaattcttgaaagtttatgaaatctttgaattagtgtggaataaacctaaaaagttaattttaaaatctaaatttattaagaattttaatttagcaagcattatgaataaatacatttctgacttatctggtggtgaaaaacagagattaacaatagctttggttttttctcaaaataaaaagatttacttactagatgaaataaattccggcttagattatgataacaggcatgaattaagtaaaatcataaataatattactgaagaaaaaacagtaatacaaataagtcattattttgaagaagttgaaaattgggctaataaattgataatccttgatagaggcaagatgatatattttggaagcttatctaagttttattctataaataagcatgattcattaattattataaatgataaaaaaagcctatctagactgacccagaagcctttaaatctttatagtaataaatatattgtatctagtagtattgatgagagacatgatataacaaatttattagagcaacaaaagatagattataaagtggtgccacaaaatttatacacaacttataaattagcattagtaaaacatgaggataggtaaaataatggctagagaaattttattaagtttaaaagcacaacttagagttccaattgctgtatttttttctattttttttccaattattatgatgattatgatgatgacatcttacggtaatttttcattaagaaatggatatcactttatagataagtatttttttattagtactactataggtattctacctctaaccttaattagttttcctattgatataaataatttgcttgaaactaagcattacttacgtttgaaatacttaaagaaactgtcaaatcttttgtgtaaatagttctttctcgtaaattgattttttaattatttatttaatcaaagtaggattctaaggtgtcctgaacctgaccaaagcctttatgaattcgattgaaataacggtcattgtagctcattgcctgaataccaataaaagcatcaagcgactgttcagttggaaactctgccttaggcttagctttgcgcttgatcacattgttaaatgattcaatcatgttagtcgaataaattgaagctctgatctgcttgggatagttataaaagaccagcagatctggttctatgtctttcaagcttctgataacatggctgtaaaccttgccccatttggtatagaagtcatgcaggacagctgtggcttcttctttgtttgtctgttgatgcacctgtttgaattcgttcatgatcttttcacgatcgtcgacgcgtactttagcgcagatattgcgcatgacatgaaccaaacagcgttgaaaatgagctttaggataagtcctggccaaggctgttttcatgccaacaacaccatcagaaagaaagagttcaacttgcttcaagcctctggacttcatgttttgaagcatctctgtccagacttcaatgttctcactaggagcaatgcagtagtcaatgacttccttatgtccattaggtttaatgccaatggcaatatagactgcttcacgctcaaacgtttctcggcgcaaaggaaggtatgtcgcatccaaatagacgcagaaaaacttgtcgcttagcttgcgtttgtggtaagcctcaaccttggggagcatctgcttggaaatatttgatacctgagctggactgtaatggctgccatacatcttttcaattagatcggctatttccctggtggtcacgcccttggagtaaagcttgataatcatgctttccaagatatccgagtgctgcttgtagtcaggcagcgtgtgctgatgaaattgaccgttgcgatcccgaggcacttgcacttcaattgggccaaattgcgtatcaactttgcggaaataagcaccatttctagagttgccagtattccagccatttctggcatagggatcatagcccagaaaggcagtcaattcagcttctagcaagttattaacagcctgttgtagttctttgcgcaataaatcatttattttgtctggattgaatagagcttgagcaaaatctttggtaaaatcattcatgaaggagttcttctttctgtatgtgttttttttgttcaaaccaatcatacgagaaaggaactcctttttctaatgtttaaagaaataaatttaaggaatcattcatccttacacaaactattttacagtctctacttaaatgttgatttaaaaaaattatttttatcaaatattatttcttatttgataattgtatttatttcagttggaataaatttaatagtaggaaaaagtatatataatttaagattacctagtatagagtatttatgttatttttttattcaattattctattgtgcgatagttctacttatatttggcttactgttaagtttaatagtatcagatatcaaagctttaatgcctgtaggaatgactataatgtttatattatttatggttataggtgtttttgtacagtatagctccttaccgaaaattatacgtactatttctagctacataccagtaaaatatttggcaaatgatttctattatatctggattggtcaggctaaatggaatatgccattttttaaatgtaatacgatctggcttatttttctgtgtttgatttgttacataatttatagaaggaagaataatgttacgaagattttcaactagtaaggatttaagaattgggatagagataatagttggaatcactttatcatttatcattaattttataatgatttcaattgggtatgccattacaaatagtgaaaaattaaaagaatattcggtcaattattttggattagtcatatataaaataaagaattatggaaataaaggtataccagtttccaataatatgatgtttatcggaatagttttaacaataatatttgtttttattgtagagtgggttgtatataagagggataagaatggtagagtatgagcttaaaggattatttaatcaaaatacgctttcaacatcagatattagtaataataataattacaataatcaacaattatttgatcatattataagaggaaatgctaattctgagatgctgacatacttacttaatatgaaccatcagcgattgaatgattttaagagtatgcatcaatataattatggaaattttgcatccttaatgaacagtgtagaacagtataacgaaatagaaaatgatgaaactattttgctacctaagccattgagaataaaaaataagttacagcaggttctaaagaaaagaaaaagtgttagaaattatataggcttatcatgtgatttacgagaattgtccacaatattgatgtattcatttggaatctcgggaagaaaagagaattttggtggaatagtcgcaagtatgcgatattacgcttctggaggtgctctatatccaatttcagtgattatatatataaataaggtggatggattgaaaaaggggctgtatttatatcagccaatgtatcattccttattaccactaaatattaaaactcaaatcgatattaataaattatttgtaggaagtaacattgatgttaaaaatagtagcttttttgtattttataaatatgcgattagttctacatatttaaaatatggtgagctatctttagctaatattttgattgaagcgggaatgatggcgcaaaatttttccttagtaactacagcatgtggttttgggtcatgtccaattgcaggatataacaaaagatttattgaagatatttgtaatttagatcatgttaatgagcatataatttttactgaaagttgtgggagaaatgaatagcgatacgattttttttgtaaaaaaagatacacatatacgcgtggtgctagttaaatcgttttagttaataaaaaagtccaatcttgttagactcaacttgtaaatataataatagaaaagagcctgatctgattgaactgccttaagcttaagcgttttagccaccatttacaagttagttttaaagatttagtgataatttgtcggcactggtatcgtttgtatgcaccggctgagtttactcatcggcgaaatattgatcaaattaaaactacggacagtctgattttggctttacttatctggcaagctaagacaggaattgaatcacaaagaagattctgtgaatgtttcaattgtttatcacactcacgttttaatcggcgttcacgtcagctattgcaattgatttatcagatacggcaagaaatgaataaaaaggttgacctgaatggacatttcttgatcattgacagctttccggtacctgtttgccaaccaattcgcaactatcgtgctaaaatttttcgcggttatgccaacattggttataaggccaccaagaaaatttacttctatggtttcaaagttcatgccattgttagcgatgacggttacattcttgattatgtcgtaacaaaagcatcagttcatgatgccaaggagacagttgaactgctggaaaatgcccatccatctaattactatcttcttggcgacgaaggctatttaggcaaagaactgcatcaacagctaaaacaaatgggttatgaactttggacaccatatcgtaaaaatatgacaggagctaaaaagcacaatgatcatcaattgatggctattcgcagaacaattgaaagcgacttttcgcttctgacctattacaatgccgagaacaatcgagcacgtagtctgataggctttcaaagccggttggaaattgtaattttagcttataatttggcttattgtctagaacgatttaactagcaccacgcgtacacatattaattctaatataaacgaatggatattaagtaagggaataattcataaaagcactttaacaataagtaaaaatgaaagtagtactttgtttgtaagtttattcaagcaattaatacaaaatcaggaaattaaagttagtgaagatgatgaagagtattcagactttaaaaaacttgttcagcttggatttttaggaataagaaataaaaataaaaaagtagcacttattgtggaagaaagtgcaaaaaacttctttgaaaactatttaaaagatgaaaatatatgtgttagctcattagatgagtttataactcaagatacattaaatattttaattgaagaaaaaaataatactaaattaaataaaatagttcaaaactataaaaataaatacaaagatgtagatttgatttttgtttgttctttgtattatgaaaattatttaaaaggaatcaacaagctaactaaattaattagtatcccatataatataggattttatgataataataatatatttgctactagaataatacatggagagactggctgctatcaatgtcttgaaaatcaaatactacaaaaatttgatggatatatcgaagattatgtatcagaaatggattctgaaaaacaagtatttgatataaaaaattatggagtattaatatctataattaagtcagagatagaagaactaaatttatactctgatacagagctacgaggaaatgttcttcatttttatttacctacttatgaatacaattttgataagaatagaattcaaagtgattgctcagtttgttctactataaataatattttatttaaagaacaaaatatgaaagcgtgcaatattttagccgaggttttaggtaatgataaatatcaagaataatttagaatataatttattgcgtcaacggatcttgggtggcgctataactggaatctggaaaaaggatactttctttattggcgaaagttcgtatccggtaatgaattataattatattactgcaaactttactaattttgaaaaattcgcttttcctggctatgttcccccgattaattatcatcttagtggctacggcttatcttataataaagctttatcggcttttctaggtgaaagtacagaaagatattctttttcagtcttatatcaaaacattaagcataatatcatttattctgattatcaaaatcttcagaaaaagtattctaattgttatatagtacctttaaattatattaatatttatttttcaaaagaagataaagaaaattatataactaaaaaagatccaataagatggatagcattaaattcactatttgatattaataaaaaggtactagttccgcttcagttttatattatgtataccaacagtatatttaaaaatgaaaaaagaattgtaaatagtgctacatcaacaggaactgcttcgcaagaaagctttgataaaagtctggaaaatgccatagttgagttcttacaaatagattcttttaatctttggtggtatggaggtctaagaggtaaaaatttaaatattgatacagaaggcttattaaaggaattgttcccaaacaataatagactttggatgtttttaaaaaaatttacggttaattttatagatattagttttgacaaagcaattaatgtagttgtttgcgaaattaccagtaatagtgatagtaaactacctaaatatgtagtaggagttcaaggaggattttgtttaaataagtgtattgaacgatccttttttgaatgtgtaactgttttagaatattgttttactcaaagttgggttgaaggttctaaatttaaaaagatttctacaaatatagatgatttaaatgtaaataatttagacgataatgtattgttttatgctaaaaatggaaagcctaaattaatcaaaaaagagaatattttaagagtgtccaaaaaggttactaatttaaaagatttgcttttgaatttaaagagcatctctaagtatgcaggatatttaaatattacgcctccagaatttagaaatcaaaactttgaaatatgtagagtatttataccagagcttttaccaatttctttaccgtcttatccgccttattatcatccaagatacagtaaaataggaggtattattaataatgtcccccatcctttggcttaaaatagcttttttcatcactttgtttccaggcggaatatatttgataataagaagaatattgtccagccatagaaaaagcataacagtatatttaataaccttggtaattgtagctattgtaaataccattattttaaagatcaattttaataggtatattgaaatcatcttaatattgattattccttttacgtattatttttttggagactgtaaaatagtttgtgtaaggatgaatgattccttaaatttatttctttaaacattagaaaaaggagttcctttctcgtatgattggtttgaacaaaaaaaacacatacagaaagaagaactccttcatgaatgattttaccaaagattttgctcaagctctattcaatccagacaaaataaatgatttattgcgcaaagagctacaacaggctgttaataacttgctagaagctgaattgactgcctttctaggctatgatccctatgccagaaatggctggaatactggcaattctagaaatggtgcttatttccgcaaggttgatacgcagtttggaccaattgaagtgcaagtgcctcgagaccgcaacggtcagtttcatcagcacacgctgcctgactacaagcagcactcggatatcttggaaagcatgattatcaagctttactccaagggcgtgaccaccagggacatagccgatctaattgaaaagatgtatggcagccattacagtccagctcaggtatcaaatatttccaagcagatgattccaaaggttgaggcttaccacaaacgcaagctaagcgacaagtttttctgcgtctatttggatgcgacataccttcctttgcgccgagaaacatttgagcgtgaagcagtctatattgccattggcatcaagcctaatgggcacaaggaggtcattgactactgcattgcacctagcgagaacattgaagtctggacagatatgcttcaaaacatgaaatcccgaggcttaaagcaagttgagctttttctttctgatggtgttgttggcatgaaaacagccttggccaggacttatcctaaagctcattttcaacgctgtttggttcatgtcatgcgcaatatctgcgctaaagtacgcgtcgacgatcgtgaaaagatcatgaacgaattcaaacaggtgcatcaacagacaaacaaagaagaagccacagctgtcctgcatgacttctataccaaatggggcaaggtttacagccatgttatcagaagcttgaaagacatagaaccagatctgctggtcttttataactatcccaagcagatcagagcttcaatttattcgactaacatgattgaatcatttaacaatgtgatcaagcgcaaagctaagcctaaggcagagtttccaactgaacagtcgcttgatgcttttattggcattcaggcaatgagctacaatgaccgttatttcaatcgaattcataaaggctttggtcaggttcaggacaccttagaatcctactttgattaaataaataattaaaaaatcaatttacgagaaagatctatttacacaaaagatttgacagtttctttttttgagtatgttataaggtataaaagattcaatatcttaagttttaaggctaataaaacaattatttatgttttagttttttttcctatatttgaagaagttgtttaccgtttctttatatttaaatattgttcggttttaggcttttctggaatacaggctatgatatttgcaacgttatgctttgaattttcgcacatatattatttaggctttaaagctattaataaattatttttttcctttattcaaagtatgttgtttttggtttttcaaagtttattgtgagactgtaaaatagtttgtgtaaggatgaatgattccttaaatttatttctttaaacattagaaaaaggagttcctttctcgtatgattggtttgaacaaaaaaacacatacagaaagaagaactccttcatgaatgattttaccaaagattttgctcaagctctattcaatccagacaaaataaatgatttattgcgcaaagagctacaacaggctgttaataacttgttagaagctgaattgactgcctttctgggctatgatccctatgccagaaatggctggaatactggcaactctagaaatggtgcttatttccgcaaagttcatacgcaatttggcccaattgaagtgcaagtgcctcgggatcgcaacggtcaatttcatcatcacacgctgcctgactacaagcagcactcggatatcttggaaagcatgattatcaagctttactccaagggcgtgaccaccagggaaatagccgatctaattgaaaagatgtatggcagccattacagtccagctcaggtatcaaatatttccaagcagatgattccaaaggttgaggcttaccacaaacgcaagctaagcgacaagtttttctgcgtctatttggatgcgacataccttcctttgcgccgagaaacatttgagcgcgaagcagtctatattgccattggcatcaagcctaatgggcacaaggaggtcattgactactgcattgcgcctagcgagaacattgaagtctggacagatatgcttcaaaacatgaaatcccgaggcttaaagcaagttgagctttttctttctgatggtgttgttggcatgaaaacagccttggccaggacttatcctaaagctcattttcaacgctgtttggttcatgtcatgcgcaatatctgcgctaaagtacgcgtcgacgatcgtgaaaagatcatgaacgaattcaaacaggtgcatcaacagacaaacaaagaagaagccacagctgtcctgcatgacttctataccaaatggggcaaggtttacagccatgttatcagaagcttgaaagacatagaaccagatctgctggtcttttataactatcccaagcagatcagagcttcaatttattcgactaacatgattgaatcatttaacaatgtgatcaagcgcaaagctaagcctaaggcagagtttccaactgaacagtcgcttgatgcttttattggtattcaggcaatgagctacaatgaccgttatttcaatcgaattcataaaggctttggtcaggttcaggacaccttagaatcctactttgaataaataattaaaaaatcaatttacgagaaagatctatttacacaaaagatttgacagtttccaaaaagctaaaaagttttgtataataatattattcagagttattaacaatcaatttttaattagaaaagaaggatactattttagactctaaacccgcccgatggggcacaaaagcatatcgtgacgctaagaagttatatatgaaggcttttccagcttgggaaagattctccatgttttctcttttagcaatgtcattacaccgaaatgttaagtttcacgcaatttataatgatggtcagttttgcggcattacttattatgctgagaatgataatacagtctatttgacctatttagccattaatgaaaaattgcgaggacaaggttatggttccaagatcttgatgatgttagaggatcgattccctgataagcaaattgtcattgatattgagccagttaccaagaaggcgaaaaattataagcagcgtgttagtcgcctgaaattctatgaaagaaatggatttcacaggactgaccgcaaattggttgatcctgatggtgaatttgaagctttgactaccggtaaaaagctagacattgatagttttactagaatgttgaagcagatgagctttggattttatcaagcaaaagttgaaaaataaaagaagcctaactggcaattccgttgagggatgctggttaggcttttcttgagtgcttaattttaagaaataatatctatgtttcacgaaataaagtcgaatttcatgggctatgttaaaataaaattaaatagcaataattaactagaaaacgagaagaaatatgaaagactatgtaattttaaataatggtgtcaaaatgccacgcttgggctttggcgtttatcaaattgatgatttagctcaaactcaacaagttgtagaaaacggcttggaagtaggttatcgacttgtggatactgcgcaaatttatggcaatgaacaggcagttggggatgcacttgtgcatagcagcattccacgggaggatattttcgtcacttccaagatctgggtcgataagtatggctatgatcataccttgcaagcttttgatgattcaatgaaaaagttgcagttagattatatcgacttgtatctgattcataagccatataacgattactatggcacttggcgagcattagaacgtttatataaagagggacgcattcgggcaattggtgtaagtagtttttggaatgaacgcttagctgatttgattacttttaatgatgtaaagccggctgtgaaccagattgagactaatgtctggaatcaagaatggaaatcacagcaatatatggaaaaagagggcgtgcaacctgaagcctgggcaccatttgcagaaggagccaaccacattttcactaatcctgtcttgcaaaagattgcagaaaagcatcataagactactgctcaagtgatgctgagatggtttttgcaaagaaattatgtagtaattcctaagtcagttcataaggctagattagcagaaaactttgatgtgtttgactttgaactagatgatgaggatatggcattgatcaagactttggatcaaggctacagtgttttagaagatgagatggatccggaaattgcggaaagttttaggtaataggcattaaaaatgtgttcaacctcataattagatataattaagaataagaaagtgatttcaaaatacgaggtgatccctatgaaaaagatgagattaatcggcacaattatcggtgttgctggagctattggtgcagtagcggcgattgtttataaaaaattcaaagaaaaacaggcaatggtgaatacgccgcaggagaaaactttacttttaggcaatacttctagtaaagccaaaagtgagttaatgaaggcagaattgtctgagaaggatcaagttgagacaaataacaccgaaattccgcatgtttcacttgatgacgataagcctagaatatttgaagataaataagatgaaaaagctcaatctgcatgaattttgtaggttgagctttttgaatgatctatttgagtaaattatcttcaagatgtttaaggtgcttaacgcgatttagataatcattgtttttctgtaaattgtagatatattttttgccaattttctcattggatagtaaatgcttctctactaatgaatttacatacttaaacttcccacactaaataagccagtaatctcttgatcttgcttggctttaggcttctatattatttttgctagttttctttaacaatttttgcatgtatttgggtaaacgattgataaagtcagccgtgaattcagctatttgtgcttcactggcatgaaagacttgctttacgctggccagcattgcatcagtaatcaattgcaaggaatggctaaaagtaatgtccgccagctcatcaatcatgcaatagaacagctcgcctagcgtgcgttcatcttcatcgtcccgcttggcaactgacataagcatgtagcgagtaaaaactatggcaacatgagcggtcaaagcatcgtaagacaggccatgatattccgtacttagttttagataacttttgcaagttttgaaaaaaacctcaatatcccaacgcttgccgtagttgcggataatttcatcttcgctaagcgacatgtcggtacaaatgattgccagccaatccttgcgattggcacggtttctaacgcagacaatccgtgcatctattttagcaccgtctttgtcctggcgtccgactttgactgggattgacagcaggtagcgagaacggccgcatcgctttttacagctgcgataaatctgtttgatgtttttgcgttctccctcaaattcatatttgattttggagctaaccttaaccatggcaatcacatccagcttcctttgcttgagctggacgatttgatgtggatttgagaaccagctgtcaaacagcacgtacttggcttgatgacctgctttcatagcttggtcgattaaattaaccatcacgtctgtgcctttagtccgggcaagcatacgtctttggccagcaatggtgcgctgatcaaaaactttattttcgccaatcatattctgtagcttctgagaagacagcagcactgaattgattggcatgaaagaagctccatcagtccagcccagggtcatcatgcgaaaacctttcttgtaagtcattgatacatggtcaaaaactttggcgactaattctgttttcttgaagccggtcctagagaagtaggaatcatcgacaacaaagcaatcagcccgtttttctgaagtcaaagatcgcaagtggttattaatgatttgcgcagacagaagtgtggtgaagtggagccaattgacgtgaacgttgcgcataaaacggtaatatgagttcttggaaaaattttcttgaaaatgatccattttcagctgcatatataagctgcggtcacgaaagacattgcttaaaacgtaaagaaacaagctgaacaggctaatgcctttttccttgcggaagccacattttctcaacagcttgatcacctgaaacttcttgatgaagctgatgattgagtttgaaaatagttgttcattttgttggtcaggagatggtaaaatagacattggcacaagcctttcatgcaaataaattatgttttggtcaatataattatagcaatgaaaaggacttgtgccttttatatttgtcaaaacacgcagaatcacaatgaaacaagcaattttgcgtgtgggaagtttaagttacatattttctaatcgtggtttgtttaccaaaatgattctgcggatctttaacaatatcatttattgaaaaattaggatttctgctagcaaaagacataataaatttctctggttcagttaatttttcctgattatcaattgcaaaagtcttaaaaatacgaatgcgagtagtattgatttcataatcaatgttaatttcaggatcatttaaattattttgcaacacagtattaagaattcttggaccaccgctagctgcagtttcagagacaccaattcgtctgaataaactagcgatttcagtatttctaatggaggaatattgtccacgtaaaaacgattctttacttacgcgcatagtaccagggtttgtaaattcaaagtaactaggtctatctacaatttttacacctaccataccatcataatatgaatgcattaaacaattgactagggcttccttagctgcgatgattagatcgttgtgataggacgttctactaaggtcattaccttgaataaatggatcaggtatatttgtacgcgtggtgctagttaaatctttctagacaataagccaaattataagctaaaattgcaatttccaaccggctttgaaagcctatcagactacgtgctcgattgttctcggcattgtaataggtcagaagcgaaaagtcgctttcaattgttctgcgaatagccatcaattgatgatcattgtgctttttagctcctgtcatatttttacgatatggtgtccaaagttcataacccatttgttttagctgttgatgcagttctttgcctaaatagccttcgtcgccaagaagatagtaattagatggatgggcattttccagcagttcaactgtctccttggcatcatgaactgatgcttttgttacgacataatcaagaatgtaaccgtcatcgctaacaatggcatgaactttgaaaccatagaagtaaattttcttggtggccttataaccaatgttggcataaccgcgaaaaattttagcacgatagttgcgaattggttggcaaacaggtaccggaaagctgtcaatgatcaagaaatgtccattcaggtcaacctttttattcatttcttgccgtatctgataaatcaattgcaatagctgacgtgaacgccgattaaaacgtgagtgtgataaacaattgaaacattcacagaatcttctttgtgattcaattcctgtcttagcttgccagataagtaaagccaaaatcagactgtccgtagttttaatttgatcaatatttcgccgatgagtaaactcagccggtgcatacaaacgataccagtgccgacaaattatcactaaatctttaaaactaacttgtaaatggtggctaaaacgcttaagcttaaggcagttcaatcagatcagactcttttctattattactatttacaagtcgagtctaacaagattggacttttttattaactaaaacgatttaactagcaccatgcgtatatttgtttctattttagctaaaactaaattataaaaagaaaagatatttaaagtgggataattcatgtcacctgcagaaactctatcattccagttggtagaattatcgctattatattgttgatagtctaattgaaaacgtgggaaacgatctgttatcgaaatatattttcccaagaaaaggagaccaccatctgtaagatgatattcatttgaattacttaatcgatcttttctgaaaacaccaattgaatataagaattcttgatcactaagttgagaattagtattaataatacctttttcttcaattattttgcgatattctttgatactttctgcatctagatcttctattgtataggtcgaaggtagtaagtgagtatcaatctcgctttgactttcaactgtaaaatatttaagttgctctttagtagctactcgatctctgtcaccagttctaatatatgctttaccgaatgcagttattggacgagtattaaagggttctggatgaattattacttgaataatagttttattttgaaaaaaagaaatctgaacatcattattttggattacaggtcgattaaggcatgaaatattgttattatcattgaaaatttgtgtttcaatgtcttcaacattgtctacaccagttatactaaattcatgtttattcttatcttctgctatgcctaatactattattccgaaactgtcaaatcttttgtgtaaatagttctttctcgtaaattgattttttaattatttatttaatcaaagtaggattctaaggtgtcctgaacctgaccaaagcctttatgaattcgattgaaataacggtcattgtagctcattgcctgaataccaataaaagcatcaagcgactgttcagttggaaactctgccttaggcttagctttgcgcttgatcacattgttaaatgattcaatcatgttagtcgaataaattgaagctctgatctgcttgggatagttataaaagaccagcagatctggttctatgtctttcaagcttctgataacatggctgtaaaccttgccccatttggtatagaagtcatgcaggacagctgtggcttcttctttgtttgtctgttgatgcacctgtttgaattcgttcatgatcttttcacgatcgtcgacgcgtactttagcgcagatattgcgcatgacatgaaccaaacagcgttgaaaatgagctttaggataagtcctggccaaggctgttttcatgccaacaacaccatcagaaagaaaaagctcaacttgctttaagcctcgggatttcatgttttgaagcatatctgtccagacttcaatgttctcgctaggcgcaatgcagtagtcaatgacctccttgtgcccattaggcttgatgccaatggcaatatagactgcttcgcgctcaaatgtttctcggcgcaaaggaaggtatgtcgcatccaaatagacgcagaaaaacttgtcgcttagcttgcgtttgtggtaagcctcaacctttggaatcatctgcttggaaatatttgatacctgagctggactgtaatggctgccatacatcttttcaattagatcggctatttccctggtggtcacgcccttggagtaaagcttgataatcatgctttccaagatatccgagtgctgcttgtagtcaggcagcgtgtgatgatgaaattgaccgttgcgatcccgaggcacttgcacttcaattgggccaaattgcgtatgaactttgcggaaataagcaccatttctagagttgccagtattccagccatttctggcatagggatcatagcccagaaaggcagtcaattcagcttctaacaagttattaacagcctgttgtagctctttgcgcaataaatcatttattttgtctggattgaatagagcttgagcaaaatctttggtaaaatcattcatgaaggagttcttctttctgtatgtgtttttttgttcaaaccaatcatacgagaaaggaactcctttttctaatgtttaaagaaataaatttaaggaatcattcatccttacacaaactattttacagtctcattattccacctgaagtattagcaaaagagctaacagtttcccaaaatgatttaggtaatttccaactagcttctttgtattcgatgttttcattttcagatggtgttttaaaattaccagtttgtgtaattgctttgaagtttaaaaagtccatttaatgtcacctcatgacttaaatttatttgtgtcaataaattatatactattgctctcgcaacttacactaactttcgccaactttcgcgtaacttacaacattgcgtgcgcaaagtgagagcaaagtttttactaaagtagctcgaagccttgatatatagggctttgttagcttcttaagcttttacaattaacttacactaacttttgccaactttcgcacaacttacaacattgtgtgcgcaaagtgagagtaaaaaataaacccgttagctatcattgcgataactaacgggttttaaatggcttattctatctattggtaaattttaccttcttgtttttctttcttaatcttttcttcttgagccttttcactagctgctttcttaggcaaaatccagtttaaaagcattccgataatggtggaaagggcaactgaggtaagttggaaattgcccagttgtaggtaagcaccaccgataccgataaccaaaatgactgaagcaattaacatattacgcttttcaccaaagtcaatttgatcatcaactaagatcttcaaaccgttagatgcgatcgtaccaaagagtaagaaggagatcccaccgataactggcattggaattgattcgatcaatgcggcaagcttaccgacaaaactgaagataatggccgaaacagcggcaccagctaatacccaaactgagtaaactttagtcatagctaacacaccgatgttttcaccgtatgaagtggtaggaggaccaccaatgaaaccggcgataatcgttgaaagaccgtcacccatcatcgttctgtgtaagccaggattcttgaagaagtcacgcttagttaatgaattcaataccataatgtggcccatgtgctccgtcattgtaacgaaagcaattggtgccatggctaaaatagcggcaggataccatttgaagtggtaactgattccaggcacatcaagtgctggcaatgtgaaccaagctgctttttccacgccagagaaatcaacaattccgaggcagcaggataagatatagccacagataattcctagcataattgaaaccaaactggtgaagcctttgaagcacatttggaaaactaaggtcatgaccaaagtgaagatagctacaccgaagtaagtcaaatcatacttagaattattcatcatagcgtcattagcggcagtagttgctaatgacaaaccaataacgatgatgattggtccaactacgattggtggtaaaactttgttaacccagcctgaaccaattttgctaatgatgatcgcaacaactacgtaaactaaaccagaagcgatcgcaccctgggcaactgccgggtagccatcagccttcattaaggcttgcattgtagcaacgaaggcaaaacttgatccgaggtatgctgggattttgaagtgggtcaagagcatgtggaccaaggtaccgattcctgatgaaagtagagcgatgcttgggttaattccaattaaaattggcactaaaacggtagaaccaaacatagcaaacatatgctgtaaggatagcagtacgccttggccaaattcaggcttttcataaacgtctaagatagcctcagggtttctgtacttttcttttttattcatttaaaactcctatttaacgatttcaatactgtctttctcatcgacttcggtcattgagacttggactttttcattcattgcggtaggaatatttttaccgataaaatcaggacgaactggtaattcgcggtgaccacgatctactagaacagccaaattaatttttgcaggccggccttgatccattaacgcatcaagggcagctctaattgtccgacctgtgaaaagaacgtcgtcaactaagataacgtttttatcggtgatatcgaagtcaagttgttggctgtggatcatcttttccttctcagcctctggtaaatcatcgcgatattgtgaaatatcaattgcccctacagggacttcaacatcttccaagtttttcaaatttttggcgattcgctcagccaagtaccaaccgcgagttttaattccgactaatacaagatctttagtacctttattgcgttcgacaatttcgtaggtcattcgcatcaaggcgcgtttcatgcttaaagcatcgattatttcttttgccatagcttttcctttctggatgaccaaaagaaaaagaccaccaagagcgcatggctcaagatggtccttctgtattagctaacgacaaaaagtattagcttgtgcagatttccttcttagcctcacgggactaactttaaaggtcatcactattattttctttatatttaactcggaaaaacacagattgtcaagatttagtggaaaaatattgtgcccggatttaaaattgaagtgcaacactaagtgttaaacaaaaaggccatgaagacctaaacttgaagtgacgaaaaatcaagaaaggaagatcttcatgaccaattcaaattctagcatttctaagcactatcatcaattaaccagcgtacaacgtggacaaattcaagcaatgctggattccggcataacttcccgtactgttatcgctcaagaagttggctgccataagtcgacaatcagtcgcgaaatcaaacgcggaagcgtcctgcaaagagacagcagctatttattgtatgagcactattacgctgatactgcacagatttattatgagaagcgtcgcaaaaactgctatcagcgcaatccattgaagcattatgctgtctttttgagaatgctctccagacgctttaaagctaaatttgatgccaccagcatcgatgagttcgttggtgaattccaaaggactatgccaggctacccttgtcccagcacaccaaccgtctatcgctatattgatcagggcttgctggacataagcaatattgatctgcctatgaagctcaaaagacgcaggaacaagcgtcatcacagccatggcggtcacgctttgcacaagaagcatcttggcaattccattgaacagcgtcctaaggaggttgaagacagaaaagctccgctgcactgggaaggagatctggttaaaggcgtcagacgcaagaatcagcctgctttaatgactttgactgaaagaaccacacgctttgaagtagttatcaagattcctgactatcgggcaagcacatgccaaaggctgcttcaaaaggagattgacagacatcctgcctggtttaaatcaatcacgtttgacaatggctctgagtttgcggatatgaccaagatcaagggctgccagatttactttgctcacccatattctccatgggaaaggggcaccaatgagaactgcaatggtcttttgcgtcaattcttccctaagggcaagagcatgaaagacaagtcaaaagcttatgttcaacaggcaactgatgccattaaccacaaatatcgccgaatcctccaatatcacacagcagaggaactcttcaagcaatatatctcttcataacctaactgttgcacttaatttgacaattcaggggaaaaatattgtgctttattttgctagttaaatcttgcatactatgagtaatagtagtttttagagttaaaaaggtgggattaaatgactaagaagcaaatatcaatggttactttgtctttgttgctggctaatattatgtcagggctagatgcgacaattattaatacggcgattccagcaattgtgtccgatctacacggaattcagtatatggggtggattgttgcctgttttttactgggaatgtcggtctcagtgccaatttggagtaaaattggtgaaagaatgggtaacaaatttgccttcgaactgtcactagccttatttattttaggttcagttttagaaggagtggctcccgatatttactttttccttgtttctcgagtactgatgggtgtcggtgctggtggaatgggttctcttccttatgtgattgttggttatatttatccgaatattaaacgtagaactgtcatcttgagttatattgcagctagtttttcggccgcttgtattgctggtccactagttggtggctggattgttgatgctttgtcctggcactgggtcttttatatcaatgttccattaggattggtatcaattatcttgagttttcttttttatcgtggcattcgtaagccaaacatcaatactgtctttgaccgactaggtgcttttaccctaattggcggtttgacttgctttttgattggaattcagatgttaggactagctagtaattttctagtggctattttcgtgattatcgggatcgtaatgcttgtctggttcatcttagttgagaaaaaagctgctagtcctatcgtgccattatcggtttttactaataaagctttagttggtgacttcattctttttgcctttgcctggggtgcatatattgcagttaacacttatttgccgatgtggtcgcaggcaatcttagggacaacggccttaatcggtgggatgacgttgattcctaactcaatctttgatattgctggttcacaaagtacgccgcatttactcagacattttaataattatcatttgttaattttcgattttacattgattgcaataacagtaatcggtttaattattgtaccaattagtacgccatatcagattttgatgtcgattgcagcgttatctggtttaggtgtaggctcaatcttcgttattcttcaaataaaagtgcagattgacgctggtgaaaaggatatggcacctgctacatcgcttagttttttgattagaattttagcgcaaactattatggctgccgtttatggggtgattatgaatttagctctagcacgtggaattgctggacaccacaatattacgatgaccatgatgaataagttgagtgacgcagaatctgcgaagagtttgcctaaggcgttaatgccaacaatgcggacaatttttcataccggaattagagaaattatgattgtatcgttgttgctaattatttgtgggtatgttgcaaactttatttataatcatcatgaagcaaagaaagctgcggaatagaaaagtgtctgggaaaaaactagcttccagatgaataaaaacgatcaagatttccttttttaagaatcttgatcgtttttttgttctctttaaaatttttaacaataaaaatcggcccttcagccaccttctttgacaatatttgttcaaattcatcatcataaaggcaattccgatatcggtttcgaccttctctttacctcgcaggtgcgttctgcgcatgccaaatacgttcttcaaatgtccgaaaactggctctacatcatattttctcatgccatagatgtgtctgccttcttcgctttggagaacttcttttgctttttcttttaaatattgccagttaggattatagcgaacttggcgctggcggccgctagctgttttagccaattgttccaattctggcgttagctggaactcgtctgcctcataaaccttaaaatcacggacctgaccagtagaacgatccttgcgctggctgtaatatttgaaattgaatctgacgccatgatgatcaatgtaataatcatctttttcattgtagtaccagttgattagcttagttggatcattcttatactttttggtctgttctttttcatacatagtgtagggaataaagtacttcttgtctggatatttttcctccagcatcgaataattgtattcactgccatagccagcatcggcgacgattttgtcaaacttgtccaacacggtcatttgatccaaaaccggctccaaagttttgaaatctgtcggattaggaaagatggcataatcaactacatattgatcggtcgtgactgcttgaatattgtagccaggctttaattgaccatttttcatgtggtcttccttcatatgcataaaggtggcgtcatgatctgttttggaataactgttgcgtccggcaaagatctcttcggcttcttcatatttttgcattcttggcacataatcttttcttagccggtgcagaatcttttttagtccacgtcgcttggcttttcgaggtgaaccgccaggaatggctttgttttcctgctcaatctctttagtcagcttgttaatttctgcttcagtttcttgagctaattcctttagcccctgactagtttgaactttttctttttccatttctttgactacttctttagtaatcaattcatcataaagttcaactgcctggcctttcagcttttcatgatacttttcaaccgctttgcgccagacaaatgtatagcggttagcatcagcttcaatcttagtaccatcgataaaagcagcaccttcattgattaagccttcatcttctaacaggttagtgaagtagataaagctctttttaatcagttcattggcatggctgcttgatctaaaattattgatagtatgatatgaaatcttttgctggtcagccaagatcatcattggcagattttcttccagcatcaactcaatctttctgccagaaaaaactcttctggagtaagcaaaaagcagtattttgagcatcatggctggatgataggctgggcggcccgttttagcagtcttgcctactaaaacatcttctggaattgaatctacaaaccagctgatgacattagccaaatgattggccggaatggcaaaatctagattaagtgttaaagcagtttgacctgtgatataattcttgtacatgttagtttccaccttttttattttgtgatgatttaataatatcaaggctggagctaaaagtatacaaaaagagcgttgaaacaaaaattcaacgttcttttttcatgatctgagacttagttttttcccagacactttttactgcaaatttttaatcacattaaatctaaacaaaatcaaattgaagacaacaatcccagcagtaacgataaagacagtgctgtaattagttaatcctgagatagttgaacccagcagaggcccgaaaatattaccgatgtacatagcagactggttccaagagaaaattcggcccgtgatttttgctggcgtatttttagtaagcaaagtctgcacttgagggaacaagcaagcatcagtaaagccgactaaaaagcgtaaaataccaagttcaacagtattttgtacaaaagcagtcaaaaagaagaggattgtggctccaataaagccagcaataataattttatgagttccaattcggtcaccgagtgcaccgaagcgcgatgccgcaaggaatgtagcaattcctggcaaagcagctattaccccggaaataaagacgacattaccgtggttagccatcaattgtttaacatagagtgaaacgatcgggttaatcgaattatttgcagcttgaataattagagtagttaaaagcaagccaaagattaattgcggtgagcgtaattctttaattactccgcttgctttatcaagtttcttttcagttactggcttgaagtctgtttcatggacaaagaacaatgacaaaagaaatgcaattaataatagaccacctgtaataaagaaggtaacgcgataggagaaaatagacgctaaggctccaccaataaatggcccgagtaagttgccagcagtaaagctagacgccatagtgccaagtgcttgtccagatttttccttcggagtttcagtcgcaactagagcattggaattagaaacaaagcctgcaaaaataccttgtaacattcttaaaataaataattcctgaattgtcaaattaagtgcaacagttaggttatgaagagatatattgcttgaagagttcctctgctgtgtgatattggaggattcggcgatatttgtggttaatggcatcagttgcctgttgaacataagcttttgacttgtctttcatgctcttgctcttagggaagaattgacgcaaaagaccattgcagttctcattggtgcccctttcccatggagaatatgggtgagcaaagtaaatctggcagcccttgatcttggtcatatccgcaaactcagagccattgtcaaacgtgattgatttaaaccaggcaggatgtctgtcaatctccttttgaagcagcctttggcatgtgcttgcccgatagtcaggaatcttgataactacttcaaagcgtgtggttctttcagtcaaagtcattaaagcaggctgattcttgcgtctgacgcctttaaccagatctccttcccagtgcagcggagcttttctgtcttcaatctctttaggacgctgttcaatggaattgccaagatgcttcttgtgcaaagcgtgaccgccatggctgtgatgacgcttgttcctgcgtcttttgagcttcataggcagatcaatattgcttatgtccagcaagccctgatcaatatagcgatagacggttggtgtgctgggacaagggtagcctggcatagtccttttgaattcaccaacgaactcatcgatgctggtggcatcaaatttagctttaaagcgtctggagagcattctcaaaaagacagcataatgcttcaatggattgcgctgatagcagtttttgcgacgcttctcataataaatctgtgcagtatcagcgtaatagtgctcatacaataaatagctgctgtctctttgcaggacgcttccgcgtttgatttcgcgactgattgtcgacttatggcagccaacttcttgagcgataacagtacgggaagttatgccggaatccagcattgcttgaatttgtccacgttgtacgctggttaattgatgatagtgcttagaaatgctagaatttgaattggtcatgaagatcttcctttcttgatttttcgtcacttcaagtttaggtcttcatggcctttttgtttaacacttagtgttgcacttcaattttaaatccggggccgccaagaaagaaaataagggaaatcgaccggtaattcaacttgatgcgcactcagatgctgtaggcttcattacgcaagctgttcgccctaatggtttaattaagtttgttccacttggtggttgggtaaaatataatattccagccttgcgcgttaaagtgcgcaatcgtgatggagaatatatccctggcgttgtagcaactaagccgcctcacttcatgacagcagctgagcgcaatagtgtacctgatgtggcagatatgtcaattgatgttggttcttctagccgtgaggagacaatcaaggactacaagattgatacaggttgccctatctttgttgatgttaaatgcgaatatcatgaaaagtccggtttattcttcggtaaagactttgatgatcgttttggtgctggtgcgatggttgatgtgcttgataatttgaagggtgaagaaactaactttgacgtagtggctgcactttctagtcaagaagaagttggcttgcgtggcgcctatgtaacggctagaaaagttaagccagatctttgtctggtactcgaaagctgtccagctgatgatacttttacgcctgactggctttctcaaactggtctaaaacgtggcccaatgttgcgcgatatggatacgacatttttaccaaatcctaagttccaacaatatgcatgtgatttagctgataaaaataatattccatatactcgttcggttagaaccggtggcggtcaggatggtgctgcaatttactacgaaaatggtgcgccaacaattgtcatcggtattccggtgcgctatgaacattcaccatattgtttcagtagttataaggactttaaggcttcagttgatttagctactgcaattattcgtgatattacccaggaaaagctagatagcttcaaaaagttttaataaattgcttaaaaagatggattctctattataagggaccatcttttttgatatacttaaacataattttatattttaagcgaggtaaagagattgattacagtatccgacgttagtttacgatttggtggccgcacactctatgaagacgttaacttaaaatttactccaggcaactgctacggcgtaattggtgccaatggtgccggtaagtcaacttttcttaaattgttagaggggaaactggaaccaacaacaggttcaatttcaattgatcccaatgagcgcatgtccagcttgaaccaggaccactttgctttcgaagacttcactgtcatggacacagtaattcaagggcacaaggaactgtatcaagtaatgaaagaaaaagatgctctttatgccaaacctgactttggtgatgaagatggggttaaggcagctgaattagagagcaagttcgcagaacttgatggttggaatgcggaagcggatgcggctaagctgctgcaatcattagggattcctgaagaagaacatcaaatgatgatgaaggatttacctgaaagcgaaaaagttaaggtcttattggcccaagctttgtttggtaatcctgatattttgctattggacgaaccgactaacggtttggatgttcataccgttgaatggttagaagactttttggctgattaccctaacattgtgattgttgtttcccacgaccgacactttttaaatcaagtatgtactgaaatgtgtgacgttgatcgtggtaagattcagctttatgtgggtaactatgacttttggtatgaatcaagcaagctagctaatgaattagctgctaaccaaaatgctaaaaaagaagaaaagatgaagcaattacaagaatttattgcccgcttttctgccaatgcatctaaatcacgtcaggcaacttctcgaaagaaacaacttgataaaattaccttggacgatattaaaccatcgagtcgtaaatatccatttgtaaagtttgaaatgcaccgtgacttagggaatgatctagttaaggtggagaacgtttcttattcggttgacggtgaaaagattctggataatgtgtctttcatcgtgcgtcctggtgataaggtagcatttttatcgcgtaacgctttagcaacgactgcgctgcttgatatcgttgctggtaaacttaagccagatactggtaccgttacatggggtcaaacaacggcctttaactacatgtcacgcgatttgaacgctaactttaataatgatgaacttacaatcttagattggctacggcaatatgcgactaaggaacaagatgataatactttcttgcgtgggttcttgggtcgaatgctctttagtggagaagaaattgagaagaagatcaaagtactttctggtggggaaaaggttcgttgtcaattgtcacgtatgatgcttgaaccggctaatgtattgatcatggatgatcctactaatcatttagatcttgagtcaatcactgcattaaatgatgcccttgtttcatatccaggttcaattttattcacgtcacatgatcatgaatttattcaaactattgctaaccacattatcgaagttggacctaaaggtattgttagtcgccaagatacaagttatgacgaattcttagataaagaatcaattcaatcggcagtagctaagatatattaataaaagattattgaatttcttgtggttgaaacttagctatttttggttcatgatgtgaggtaaataaagaatgaaaggacttacattatgaaacgaattaaaatgggatgtactactttaagcattccagcgatggcacttggcattatgcgaatgaatcaaaaatcagttccagaggctcaagtggcaattcaagccgcctatgatgctgggatcaacttcattgattctgctgatatttatggcggtggaaaatcagaagagatttttggtcaagcttttagccaaatgcagatcaagcgtgaagagatgtttattcaatctaaaacaggaattgttccaggaaaacgttatgatttttctaaagaacatattttgcatagtgttgatgaaattttggaaagaatgcaactagattatcttgattcattagtacttcaccgaccagatgcattgatggatccagaagaagtagctgaggcttttgatcaactacaggcagcaggtaaggtgcgctttttcggcgtatctaattttgatacggctcaatttaaattgttacaaagttgcttgagccagcgcttgatgttcaatcaattacaatttagcctgaaacatacaggaatgattgactttgggatgcatatgaatatggtagataaaccatcagttgatcgtgatagccaatttcttgattatgcccgtctacacaaagttactgtgcaggcttggtcaccattccagtatggcatgtttgaagggactttcattgataatgatggcttccccaagttgaatcaagagttgcaaaaactggccgataagtatgaggtaggtaaaaatgcgatcgctgcagcttggattttacgtcatcctgcaaatattcaaatgctagttggatcaatgaatccgcaacacattagggattctgctaaaggtgccaagattcgattgactagacaagagtggtacgatttatacttagctgctggtaattatttgccctaaaccgaatattttctaataaaaacaaaaactagcttttaaaagctagttttttgcttataatagataataggactatataaaaggggattaagaaatgaagaaaaaatatggaaaaaatcttatttttgaagattttattcatgatcgggaagtgaagatgtatcattgtgatgcagatgatcccgctcattcagattatactttaaatgtacaagtttttacgctagataatttgccattttcaccattaactggtgatcagcaacacatcttttttgactatgcaaaagctggaactgatgcagttaagattacaggtattgaaggttatttttacaatgcagttactaaaaggtatgaagtgactgatcatacgtttgtagtaggaaaattgcttaatgacaaggtaaacgaagaagtagctacgcagcaaatgaaggaagctgttgaaaaggtaattgcagaattaagtaaacgtatcccaatgccagctcactttaagcatcccaaaattttaaccgatgtacaaagagcagagaaactaataactgaccgtaatgttaagattactagtttaagtaaagcaactggaatttcaacttatactttgtataactatcgtaagaatcctgcttctttgcgcaaagcttcgcatgcaacggttgattgcttagtaactaagtattttgaaacttactttagccgtaatgagattgaacgctttcggatgatgttaatcagcattgttggggcttatttaaaagaagcagagggcaatccaattgcttatgatcctgctcatgccttgtatacaatgtgtcaaaaaggagattggcatcgtttagctaaaatggaagaattgtggcgtgcaagctacagtgtagaaaagtcgctttaatacaagcgatgtttattcatgcgtttaacggcgtagaagatcggtaagccgataatgacaattccagcaaaaagcaaaacaccagctggatcattaattaattcactgattaaaacaaataaaccgcctaaaatagcaattataggcacaaaaggataaagtggagtactgaaaggacgctctgctttattctttttgcttaggataaaaattccaaagaaggctaaaagatagaagcaataaactgtaaagacgcaaagatctgataagtggtctggatcaaagaaaatcatcattaaaagggctaaaaggacaataaataaagtagccacaacgggtgactttcctttaggagtaacataggctaagtatttagaaaaaggtagatctcctcgtttagccatggcataaacgattctaggaaaggtcagcatttttccatttaatgttcccatcattgaaatgatgatgccaatggaaagaattttacctccgattgcaccgaaaaccgcgttagctagataagtagtagtgttttcgcctagttggtgaatttgattagcggggatgaagcggaaaatcccaattgtaattagggtataaatagccaaaacagctgtaattcctgcaatgattgctcgaggtaataatttttggggatttttcatttcgccgcctaaattagcgattaaaatccaaccgtcgtaaccaaataaagttgctaagacagcaacaccgaagttactagtgtgttggctaacctctgctacagtctggttaatcgcatcttgttgaccccaacagattccacaaatggtgattacagcaatcggaatcattttggcaatcgtggttatgactgaaaagattgcacctaccttattttcgaagaaattcatgattccaattgctaaaactgtgattaaagccaaaggaatgcgccatgaatgattcaaaccaaaaaagttagtcatcatgatgctcataaaaccagcaacggcggcaataattgcaggaccgtacacgatgatctgcatccaaccagccataaagcctaaaatgcggccatagagattttcaatgtagacataaagaccaccagtgtagggcatttgcgccccctatctcggcaatggtgagacctgcagccaaggtaattagaccaccaaaaatccaagctagtaaggccattgtagttgaacctgcactgtcaagaacagaagcctgcttaaaaaagataccagagccgatgatagttccgattacaattgaaaaagctgagccgaaaccaatactgcgtttaagcttgttgtccattttttctcctttatacaaaaatagccggattcaccttatcgtctagaaacgattgagtgaatccggctgctgatttacgtacaccaaaatcactcaagttcagttggaacttgagctagatgagtatgccaatgtggtgtcttgataaatcataattgaatctcctaaattaattttaattagaatatcataattattaaaaatgaacaagaaaaatttgagatttttagtcttcgataatcgtgttctgtgctttgctcatctttttaactaaaaagaaaattggccagccgacagcggtaattccagtaaaaagcaaaacgccagcgggatcattgaagaattggctgactaaaacgaagagcccgcccgcaattgctactaaaggaattaggggataaaacggtacgctgaaaggacgttggtccttatttttgtatcttaaaatgaataagccaaagaatgctaaaacatagaaactataaattgtgaagacgcagagatttgataggtaatcaggatcgaagaaagtcatcataattccagttaaggtaattaagagcatagtggcaatgactggtgcttttcccttaggtgtaacgtatgataaaaatcttgagaaaggcaaatccccgcgcttagccatagcgtaaataatacgaggaaaggtgagcatttctccattgagagtgcctagcattgagataataatgccgacagatagaactttaccgccaattggaccaagaatagcgtcagccaaataagtggttgaatttttacctaatgcatgaattttatcggcagggatgaaactaaaaataccaatagtaattaacgcgtaaattactaatactgtagtgattccaatgatgattgctttgggtaataatttttgtggattcttaatttcgccacctaagttagcaataaagatccaaccgtcataggcaaaaagggcagcgagaacggctacgccaagaccacctgttgatcgattcagctcagtcacagtttgggcgacagcgttttgctcaccccagcagatgccgcagaagataattgcaaaaatagggatcatcttagcaattgtagtgattatagcaaaggctgcaccgactttattttctaaaaagtttaaaccaccgatagcgatgatagtgatcaaaccaatgggaatacgccattcggtgccgatgccaaagagattagtcaccataatacttaaaaaaccggtaactgcagctatcatagcaggaccgtacacaatagcctgcatccaaccagccataaaacctaaaacgcggccgtaaattttttcaatatagacgtaaagtccaccagtataaggcatctgggcaccgatttccgcaatcgttaagccggcggttaatgtgataatcccagctaaaatccatgctaaaagtgccataaaggttgagcctgcgctatctaaaactgaagcttgtttaaagaaaattccagaaccgataatggttccaacgataattgaaagtgcagaacctaagccaatactgcgtttaaggtgattgtccataaaagtcctccagatgtaaaaatatgtataacattatatcatataaggtgacatatagtttctaaagatatagtaaaagattaactgaattcttcttgtttaccactagaattgagtataaaatgaaaaacaaaaatattgttgagtgagaaagggattttatgcgcgttaatgtattacagcatgcacctaatgagggacctggttctattcaagcctggtgccatgctagagataacgaaatgttcgtttaccatccagggaattttggtattttgccaactgttgatgaaacagatctattagtagtcctaggcagtccaaacagtcctaatgatgatcttgattgggtcaaaaatgaacgtgtgttgattagacaaatgttagatcaacacaagccgatcttgggaatttgttttggtagccagcagattgctaaaactttgggctataaggtacttgatgcacccgctaaggaagtaggttgggcaccagtttatttgcaagatcagactattacaggaattccggataagttaacagctcttcattggcatgaacaaatgagtgaaattccaaccgaagctaagttattattctctagtgatctagttaagaatcaaggctttttactgggagataatgtaattgggttgcagttccactttgaaccgcaaattgataatgtacgtgagattgctattaatgatggagcatatgctttagaaaataaggatttacatcaaacgcctacagagattattaatcatggtgtgcctgagaaaaataaagatgtaatgtttactttacttgatttcattgctaaataagcgaaaaggctaggatcaaaattttgatcttagcctttttcttacttcttttctagttctttaatgttcataccaggaatgttgccaaaccattttttaactaggtgattatatgtgccattcttttctagttttgctaatgcagtgttgatatgcttgagcatgtcattttgccccttattaactgcaataccatatggctggttggtaaaggtgccgccaactaatttatagccggaactatcacgcaaaatcccagctaaaattccgttatcagttacaaaggcatctccttgtccagcttttaatgcggcaaaagcttggccgtaatcatcgaattgtaaaatttccgctttaggagcaacttgatggatagcatcggcggcagtagttcctttaactacaagcactttcttgttattcaaatttttagcatttttaatggcgctactgtcagcaaccataattgactgtccagcaggaaagtaagggtgactgaattcgacttgttttttacgttcaggcgtaatggtcattgctgcaatgacggcgtcgacattcgtgttttttagaagctgaatcttggtgttggccgttgttgttatgaaattggctttgacatttttgcctagcatttcatgggttaatgcattagctaaatcaatttcaaagccattaagtttgcctgttttaatatttattgagccgaataatggcgtgtcggctttgacgccccagttaatggttttactagttttaactgcttgataaacgttttgctttttgttttgcttacagccacttaatggcaaagcaaacaggaccactattgaaattattaataaaaactttttacgcatataatccctgccttgttttacttgatgatttttttattataccaatttgaaatttagatgcaaaaattgtttctttactttaattatagtcttatttttgacaaaatgatttgacaatagtccatgtgcatactaatatatttggtatgcatgtagactaaatatggtggtgaagtaatgaaaattagtgagacagaaaaattaaatctatcaattatccatggcagccgtgcttatagccaatgggagcaggatcatgacttgcctgactatttagtggtaatcatgtatgaattactgattcggggaaaattgacacaaagagaattagtaaatctgagtgatttacccaagcagtcgattaacaaaggaattaagattctgcgtgatcatgatcatatcacgatgactgttgatcctagcgataagcgagttcgattttgccagcttaccgaagcagggcggaaatatgcttatgacaggttgcgtcctctatttgagttagaggaaaaaacggctcaagccatgggaactgacaaaatgaaattgttagctaagctttcagaagaatggagcactactttttggcattttttaagtgaagaaaggagtaaaaatggaaaactttaaaataattcttccatacttaaagcgttataaaaaagatgttgtttgtgcaattattgctatcttagtttcagcgttttctggattatatcagcctaaattattggaaaatattcaaaaggcattgatggcgaatcagaagcaagcagtcttgtctgatggaatctggctagtagtcctaggtataattgcaattatttcgggtatttttaacgtttattttgcagcgaaaattgcacaaggagtagttagtgatctacgtgaagatacctatgctaagattcaaacgttctcttttggtaatattaagaaattttcagcaggttctctaactacacggttgatcaacgatatgaaccaggtaatgaacatgatgatgcagctatttatgcagatgttgcggttgccgattttaattgtcggttcatttatcttctgtatcgtgattattccgcgcttctggtgggcaccagtggtcatggttgcacttatttttggttttggcgcttacgttttaagacaaatgaatagtttgtttaccaaattccaagaaatgatggaccgaatttctaatcaagcacaagaaacattgcaaggtgtgagagtggttaagtcatttaatcaaggtccacaagaaattaaaaagtttgatcaaacttcggaccaattgaatgactacaacattgtgattggttactggttctctgcaattatgccagcttttcagatgatcgcttataccgtaattgctttaattgtttatttaattggtaaaaatattacggcacatccaagtgatattgcggtagtcagtccattcgtgaactatgttttaaccctgctatttacgatcatgattgccggaatgaccttaatgcaattttcaagagctaatatttctcttggacgtattcgtgaggtattggagactgaaccagatgtcaagtttgtggaaagtggttcggttgcacctcttagcggtagcgtagagtttgatcatgtttcctttacttatcctgatggggatgatcctactttaaaggatatttcgtttaagattaagccaggtcaaatggttggtatcgttggggcaacaggtgctggtaaatcaactttggcccaattaattgctcgtttatatgatccaactaagggtaaagtaaaaattggcggtcaaaatattaaggatgtaactgaagctgcattacgcaaaactgtttcttttgtgttgcagcgagcagttcttttctcaggtacaatagcatctaatttgcgtcaaggtaatgctcaggctaaattacatgaattgcagcgtgctgccaatatggcgcaagcatcagaatttattgagcgttataacgattctttcgatcatgaagtagaggagcgttctgctaacttttccggtgggcaaaagcaacgtctatctattgcacgtggcttgattgctaaagcaccaattttaattttggacgattcaacttctgctctggatgcggaaagtgagaagaaagtacagcaagctttagagcatgagctgcctgatactactacttttattattgcggaaaagattgtttcagtgattaatgccgatacaattttagtgttagatgacggtaaattagtggcacaaggtacgcatgaagaattgcttaagacttcgctggtttaccaagaaatcttcaagacacaaaaaggtaagaaaggaggaaatgaataaatgagtaatacgaaaaaggcattgcgctattttgctaagtatttgaagccttattggaagggaatcactattgtagttatcctttctctgatttcgagtggtgcacaggttatggcacctacatatttaggccgttcagttactgctttaactacttatttggttgatttaaaaaagggtacagcatccatgaacacgttctatagcgcgttatggtcgatgttcttgttttacttattgagccagatagcgatttttattgcttggatggtaatgtccaagttcaatgcggattcaactaatgacatgcgtgagaatctatttgccaagtttcaacggatgttagtgcgctactttgatactcatcaggatggtaaacttttatcgctacttacttccgattgggataatattttcaacgcaatgaacaatgcgatttttgaaattatttcccagggaattatgttcgtgggaacaattattgtgatgttcacgattaatagtactttggcttggactacgattgcgacaacaccattcattttgattattagtgtccttttaatgaaaaaagctcgcgtttatatcgataagcagcaagatgaaattggcgatttaaatggttatattaccgaacagatcaatggtgaaaaggtgattattaccaatggtttgcgtcaagaatcggttgatggcttcaaggtctacaacaataaagtaagaatcgctttgtttaaggggcaattttattcgggaatcctattcccattgatgaacggattgaacttacttaatttggcaattgtcatcgctatggggtcttggatgattatttccggtcaaatttctcaggctattggattgggcttgattgtaactttcgttgaatattcacaagtttatttccaacctttgacgcaaattacttcaatttattccatgattcaattagctttaactggggcaagaagattagctacagttgaagaacaaaaagatgaaaacgaagtgccaaatggtaaggtcattagtggtttgaatcatggtgtcaagctagaaaatgttcattttggctacaataaagataaagaaattttgcacggagtaaatatttcggttgataagggccaatcagtggctctggtcggaccaaccggttcaggtaaaactacgattatgaacctgttaaatcgcttctatgatgttaattcaggtaaagtaacctttgatgggacagatgtacgtgatattcaactaacatcattgcgaaataatgttgggatcgtcctgcaggactctgtcttatttactggtactgtagcggacaatattcgttatggtaagccgaatgcttcaatggatgaagtgatctcagcggctaagcaggctaatatccatgattttattgagactttgcctgatggttacgatactcaagttagcgatgctagctcaatcttttcaactggacaaaagcaattaatgtcaattgctcggacaattttaacgaatccaccattcctaatcttggatgaagcaacttctaacgtagatacggtaacagaagaaaagattcaaaaggcaatggatactgtgattgctggacgaacaagctttgtgattgctcaccggttaaagacgatcttgaattctaataagattgttgtgttaaaagatggtaatgtgatcgaagaaggcagccacgaggcactgcttaaagaaaagggattttattacaaactttacacagatcaaatggcatttgattaacaatgtgctatacttgacttaattgataaataaatgaaatgtcactaggggtgcgtaatgctgagataatacccttcgaacctgaacaagataatacttgcgcaagggaaagtgctaacaagagaattaacttttatttgtgtgctcctactgacagtatgttagtaaggagcatttttatgtttactagatcgtcaaaatggaatgtaaagtcaattattttagtggctttaattggaataatcatgggcgtgatttacacttatggttttaataatgtgtataacttggtgaaattgagttttttgcccacgggttatgcaccagtagtggataatatttttacaggattatggtacatggcggcaccactagcaatgtattttgtaccgactaagggtgcaggaacaatcggtgaattattggctgcgactgtagaaatggcgatcggcggacaatggggagctttgacaatttttgaaggattaattcagggggcaatgaatgaaattggctttttccctaaaaaggaacgttatgaaagattctcttggaaaagtgtcttgaccggtgccttttttgctaatttgggtggctttattcccagctacttcttatttggttggagtcactatcaaattaatgtccaaattttgatgtttattgtcagcatgatttcatcattagtatttgatggtgtactagtaaaattgattactaatctatttgataaagcattaaagccaaggcttgcctaagtcatataatcaataccttttcgtatacacacactttattaatactatataggtgctaagattaaattagatatttgtatacgttttcataaaaggggaaggggacttatatggctcgacgaagcaatgcggaaaaggaagctgaggatgaggcgattaaaaattggaatccacgttataaacacaatgtcattgtctacttatggatttatggtattttaggtgcagtaacagggattacgaatgatgcagccttgtcttactacaagattgtagcgccacacttgatttcaggtttaaacatttttaatgcggcgacagcaattttgatgtcagtcatgattgcgacggttcataaatggggctatcgaaagattttgctgatcttgccaccaatgacggcaatttttatggccttaacctgtatcacaaccaatcaaattatcatcatgatcgcttatactatttcttggacagcaattggggtttatgatttgatgtatccactgatgtggacttcatatgttccagggaagattagaactaagatgttctcaaccgttatgattgttaacttgattacgcagacaatttgtactttcttaggtgggaaggctgttgtttggttctttggcttaattagagggattccttatcacgaagcttcagttctatcaggtaattctgaaatgttaaccggccaaactttagctgactatacaaattcatacagaattttactttatattacagctgctgtaacgatgttagcctttatcttagccctatttattcacgatgtaccacgtgactatcgttctactgcagatgataaagaacctagcagagttgaaaaggtggccatgtataagaagcttttgagcaagaagacattgatgtggattgtttatattgccggtatccaacttggtgctcgtttagttgccgtttatgtgccaatttatttgaatagttatttgcacattccacgtgatgttacttctaccatcaacacttttgttcaagcagcaatgctaattggttacttctttgctccatttttggaaaagaaactcggtgcaatcgtgtcggttgctgcaggtacattaacttgtgtaccggttatgcttttgttagctaatggtcgccggttaggtagcggagccttcttattcgtcattgtcgcaattctgcttttcttgagaacaggtttagccaatgccacgatgccgattcagcaagaagttcagatggttattgttgacaaggacttgcgtccagcctttactggtgtagttcaaattgcctatgctatcgttggagttattgatggtctcttcactgaattttacttgtttaatacgcaagatggttatgctaatgcttactacattgcagcggttatttatgttattgccagtgttttgcttttggtattctttgctaagaaatataaccgtattttggatgcagctaatgcacaggatgataagaaaaactaagataatttagagtattaaaataggcaagttaggtattattcctagcttgcctgtttgttatatctcgataattattcacttaaaactgattgcaacttagtagttaacatatcgatagccacatcgttttcgccgccttcaggaacgatgatgtcggcgtaacgcttggttggttcaataaattgattgtacattggcttaaccgtgcccaagtattgattaataactgaatcaagtgagcggccgcgttctttcatatcacgttcaagtcgacgaataaaacggatatcatcatcagtatcaacgtaaaccttgatgtccattaaattgcggatatcttcgttaaagagtaccaaaattccttctagaataatgatatcagctggttcgacgtgaatagtttcatcactacgggatgagcagtgaagtcataagttggcatttcaattggctttctgtgcatcaattgatttaattgtgcctcaagtagtggcatatcgaaagcatcaggatgatcgtagttgatcttcattctttcttccattgatacgccagtattgtctttgtagtaagaatcctgcgtcatgatcataattcgatcttgatcatcgatgttatcggcaatttcgtgtgcgattgttgttttcacactaccagaaccaccagcaattccaataataacgggtttttcaagctttcccatatcaaactcctttaattttctaggtatcactaatattctaagctattttccgaatattaacagcatttattttaattaaaaacggatacatttgcgatttaaattattttcccttgcattttcttgaaaaataatgttaaatacatataaataaattaaaaggctatgaaaaagacgagtaggtagtttattcttagcagtgagttggtgttagtgaaaagccagcagaccctgaactattgaaaaacacttttagcagctcaccgaactaacaattcttatagtaggtcgagacgtctccggtacgttaccacgccggtgaagcatgtcggtgcttcatgagttggtctatacttagacaatgtgggtggtaccgcggaaaaaagcctttcgtcccaaactagaggggatgatgggctttttctttatcctgaaagttagtagttaataaattcgtaagtagcgttaatatgattattttaatctagctaaatacaaatatattttgctaaaaccgaacaaatttataagattagcaggctattatactattttgaattgctaaaatatttagttttagctttaagaagagtaaaataattatattgtgtagacaaaggaaagaaaggtagaagccatgacagcaattattgaatttaagcatgttgataagtactatggaaagctccatgcattgaaagatattaacttaaagattgatgaaggccaagtggtttcaattattggtccatctggttcaggtaagagtactttaattagaactatgaatggcttggaaccaattaatagcggtcaattaattgtaactgggtatgatttggctgataaaaagaccgatattaataagattcgtaaaaatgttgggatggtattccaacactttaatctctacaataatcacactgtgttagagaacgttatgctggcgcctaagattgtgctaaagcgtcctgatgatgagaaccgtaaagtagcgatgcaatatcttgaaaaagtaggtatggccgataaaattgactcttatcctcatcaattatctggtggacaaaaacaaagagtagcgattgctagatcattagcaatgcaccctaaggtgattttatttgatgaaccaactagtgcccttgacccagaaatgattgaagatgttttagaagttatgagatatgttgctgaacaaggcattactatggttgtggttacccacgaaatgggttttgctagagaagtaagcaatcgcttaattttctttgataaaggtcatattttagaagatcgcaagccagaagaattctttgctcatccagatactgaacgtgcacgtcaattcttaagcaagatcatttctaaagattaaggtggcacgccatgaaaaaattaaaaagattttttttctttcccttattgctaatcttggcacttgccttgactgcttgtggcaagcatgctagcaataatgtttatcaaaaagtaaaagaaagtaagacaattgtttggggcgttagagcagatactagattgtttggcttaacgaacattaagacaggacatattgaagggtttgaaatcgatttggctaaggctttaactaagcaaatgctaggtaaagatgctaaaaccgattttgttactactactgccaacactagaatcccacttttaaaaaatggaaatgttgatgctgttttagccacaatgactattacaccagaacgtgccaagcaagtaaccttctctaagccatactttccagccggttcatctttgttagtgcctaataatagtaagatcaagaatgttaaggatctggaaggcaaaactgttttggccgttaaaggaactaccgcagttgatgatgtacataagtatgcccctaaagcgcggattttgcaatatgatgactatggtcaagcaatgtctgcattgaaggctaaccaaggtgtggcattaactactgacaacggcttgcttgccggtatcgctcaagaaaatcctggttataagttagtcggcggcgtctatagtaatgctccttacggaattgctgttaataagggacaaaaacaaatggctgatcatatcgaccaagctttgaatgaattacaaaagaatggtacttatgaccgtttgattaaaaagtggtttgctggaattcctggttttagtctaaagggggttttgaaataatgtggcaaattattactaacaactggggcagcttcctaacaggtttttggaatactattttaagtagtattattgctctagttttcagtttgattttaggcgtgatttttgccttgcttgaggtagcaccatctaaatttggccaagtgatcgcgaagatctatattgcgatttttagaaatatacctttgctggtaattgtcatgatcttttatttgatcgttccacgttatattgtgaaattgtcaggatttcaagcggggacaattggtttaacgctttatacatcagcgtttattgcagagactgttcgtgcgggaattaattcaattggaactggtcaaatggaaggtgctcgctccaacggtatgacctatgtgcaagccatgcgttatgtcatcttacctcaagcgatgaagatagtgattccaccactaggcaaccagtttgtcaacttggttaaaaactcttcagttttggcctttgttgccggttttgacttgatgtatcaagcacaattgattgcgttctcaacgttccaaacaattgatacttatattattgttggattgttctacttgatcttgactttgccgcttagttactacatgcgtcatttagagaaaaaattagtcagctaataggaaggggatagagaatggaaacttttattcatgcatattcatgggtcgatattcgcttcttattacaaggactttgggtaacgatttatgtttcattaatttcaattgcattaagcttcgtagtaggattaatcttaggattagttcgctacatgaaaattaagtatgtgtctgcaattgtaggctttattattgatattattcgaaacttgccgctattgttgatcatcttctttacctattttggtttacctcaattaggtattgtaacgaatccaacgacagcttcaattgcagcgttagtcatctttgaaggtgcaatgctagcagaaattgttcgttcaggaattggctcagttgattcgggtcaaatggaaggtgcccgttccaacgggatgtcgtatggtcaggctatgtatcatgtaattatgccacaagctttgcacaatatgattccggcattattatcacaatttgtatcattggttaaggatacttcattggcaactatcattgttttgccagagcttttataccacgcacaaattatttacagtcagaacacgacttacttaattccaatgtatgtgattattgcaatcatgtactttattgtctgtttctgcttgtcaacgattgcaaattacttgcagaaaaaatatgattaaaggctcaaattatccaaaaaaactaactcatgctaacataatagtaagagttagttttttattttaggaaaaattatgagtgtaaatgcacagttaacagatcgtgaacgagttgaattaactaaaaagacatatgatgaattgcagctgggtgatactatcaaaatagatcaacattatcttggaactgtttgtcgtaatgtttatgctaaggatgggatgcgagccttcgtcatttcaagtccgaatgaaataacaatcttatttaaaggatcatatggttttaaaaaggggactccacaaacttggcgtgatgaatggattaaaactaatctaccaattttaaaagcactgcttgcacgaaaacggacgattcctagccaattaaagtcagctgctcacttattgaatcagacaattaatcaatttaaaggtagtagaatttatatttatggtcattcgttaggttcaattaatgctcagtttgctttagctaattgtcgtcatccagaagcaattgcagctgcttatctgtatgaaggaaccaatatttggcttttattaacgccaacagaacgacgtcaggtggctaaaatgcgggagaaaatttttaactatgtcgatatttatgacccggttacgttaggaattactgagacgcaccatatggtaggaaaattgtgttatgtggatagcgaaccgatgcaaccaattaagcagcatatgtggggaggatatcactttaatgcagatggtagtttgaagttacgtaaggttgatcaagcttttctggcagaaagtcgtagtgagcgtaagttacttgctcgttcaggtgatttggcagattttttagagaaaatgggctcagccgaagaagtaaaaaaattagctaccgataaaattgagcaattagttcaacgctatcctgatcataagagtttggcaaaattgaccgctctttttgaaggagaaatacggaaaagtaaaaatcggtaaaagaaaaaagcaaattatgctaatttgctttttcgttagacaatgattatttaaccaatgccttagttttgtatgcatatgcagcagtataaggaccagcaccagtagctattcttaatgccttaacctttttgccgttaacagttctagtaacagggatgtagtattcaccatcaccagctaagttaacccaattgttgacattgaagccctttttatagttagctgcagcataaatattttcagtttttttgatgaactgattacgcttcttagctgaaacgttgtaaacatttttctcgaagaacttttgtgaaggtacgtaaagctttttaccatctacgctatgagcagtgatctttaccttagaaattgttttatcacccttttcgcgataataccaggtgccacgggttgcttttggtgtggtaaaggttttagcaataccatagcctttaggaagcttgctagcataagttggtgtagataccaagaacaataaaccggctaaaaaggatacgaaaagtaaaagtttctttttcatagtagtctccctcatttaataaatgatattttaactacttttattataatggttttacaggaaaaataatataaaaatctataaagaattagattagcattaaaaatttttgtataatattcatatttaagaaataagaaggtaaatatatgacgattgattatagaaaagatattattgatttaatgcaggcgacggggagcgatccccaatcactgaagcagtcaatgattgcgttgaaaattattagtaaaatatataaccaggcagtactaggcaatccacctgagaataagaatgaagtcgttaaaattgcggaaaaagctgatcaggctgtaaaaaatgagccagaaataaaaactgagaataagctagaaaataaaactgaaatagaaactaaaaaagaaaatgatgaaaatactgtagaaaaaataaagccgaaaaaaacgaaggaagagcttgaaaaagaaaaagctaaaaaagaagaagctgctaaagctctgagtcctacggttttaaagaataaaaacaaatatgcgaccataactcctattcctaagcctgtggttaagaaaataattcctgtggctaaaccaaaggaaaaacaatatgagattaggcgtaagctgctaggtgcagaagcagtggatgagaatggtcattcagtacaatattttaatgaacacttgactagaattgaaaagctggaaaacggtgatacagttactttgctagatcacttaaatgacagtggcaatcgtccaattattaaagttgagcatcatgcaaagtcttttgcgccagatgaggaaattatcgaatttggtccagcggtagttcaccgtgattcttttggtttatacatcaagcaggactctaatggcaaaaacctaagtcaagtaaatcctgaaaaagctattttatacttagacatgaatactgtaagtcactttaacttacacgaaaatgacctgattagtattgtttggcgagtcagtgatccatccttcattagggttagatggcgttatgccgaagctgaagttactattccagaaaagaaggaaaagccggataaaaataaagaaacggaaaagcacaagactaaaggtagacacaagtctttattgcatcaattagaaaaaaaggagaagcagtcgtctgaaaagcaaaatgaagactatgcttcccgaattgattttgacctcgataaaaaacgagttaccgttgtagtaggagacaagagcttaacctctaacttggctaaggtgattgaagcacacaatggagtagctcgaattatcgagatgaaacaggcttctaatgttttacgtgcatgtaaggaatcgaattatgtcattctaatccagtcatacattaagcattctatcagtcaaatcctgatcaattcaccacacaagtcatattcgattgcaatggccacaactgcagggcaattagcggtagaaaaggctttatatcgtgctcgttacaagttgaatgtaactgataatgatcaaattcaatatccatttttagtaaataattaggtaaaaaaagaagttcaattaatactgaacttctttttttgatagatattttatttgaaaaattattgcttccaagcagcatcaagcttatctttaccagtcttgatatcgctattccatgattgctttttacttgccttagctaaaatggtttgcatgttagcattaacttgatcatatgcggcagtagcattcttagttactggtaagaagtaaaggttcttagaggtcttggcaataattgctggtatcttgctgttcttggcagattggtaaaccttgtcgttgatagcagcagtattaactggcatgtagcctgtttgtttagcccagtaaagttgtgatgacttagaagttaagaacttaaggtacttaaacgcagctgacttttgcattgcggttgcttttttgaacatataaatgtcagtaccttgttgtacgttcatcgtgcttggacgagcagctacaccataagtgtaacccttcttaagtccttgcttaaggtaagcttcattggcagttgaaccgatgaacatagcaacgcgaccattgttgaatggagttgacatgtacttttcagtaccagcttgcatgaagtagccggctcttactccattagcgtagtagttgatggctttaacggaatccttggcagcaaagtttaagttcttattgaagtctttgccgtaagtttccttcatttgcatcatgtagtaattgtttaaagcatcaaatccaacaccgcgtactttgtggtgactttcacggtaaatttttgcggatgcagaagccaattcactcatgttagttgggactttaacatcatacttatcaagtaaggtcttattgtagaaaagtacttcaactgacttgttgaaaggaacaccatattgtgtaccgttgatgtttgcaccatcccaaagagctttcttaatgccactcttagcatatgagccccagccaatttcagaattgttaatgtatggggttaggttaacaagcatattgttcttggcagcattgtaaagccagccaggataagcttgagtaattgtcggtaaatcctttggcgattgcaaacctgaaaccaacttagattgtaaatcagagtagttgccgccttggctttgcaacttgatagtaatgttaggatttttcttttcaaaatctttagtcaatttttgcaaactgctttgcgcattaccagttagtgaataccaaaaggtaacggtagtcttcttgttaatcttagttggaatcttcttattagatgaagatgaactagaattattatttgaacatgcactcaagcctagaacagctaaagctgcggcaccagtaagtaccaattttttatagaatttcatgattcttcctctcatgtatatcatgtatttcttttacaaaggtagtttatcatagatagacgtactattcctagctttattaataaaaatgttcacaattaaccgataaaattgttaaaatgatgttaaatgtatgatatctttggtttagcaggtgaaaaatatggacaagaatcctttagtgtatgaatattcaattggtaagcgtaagccatatgattatgattatggtaatcggcaaggaaatcagaatgctggctgtcctttttgtgatgtgcagcatctaattaatatttatgaaaaagatggcgataagatttggttgaagaataagtaccctacgttaaaggatactaatcaaacaattttaattgaatcaagtgatcaccagggagatatttcaacttatacgcgtgaagataatcaagagttgatgaagtttggcttgaagtgttttcaaaaaatgaataattcaggccgttatcagagtgtgctttggtataaaaattttggtcccaagtctgatggttctttaactcatccacatatgcagatcgtgggcttatatcataaagatggctatcacgatattggcgctgataactttaaaggatttgaagtcgggcgttcgggttcagttgaaatgaacttatcagcgcgtccagttcaaggctaccaagaagtaaatattttgacacatgataatactaatttggatacttgggccgatttgattcaaaagggcacacaatatgtgcgttcagtcttgtcacatggtgttgattcttataacttatttttctatccaattaatgatggtcaaggtacttgttgcaagattattccacgattctatgcttcaccatatttcgttgggtataagatctcgcaagttgacgattcagatacattgaagtgggaagctgagcgcttaaaaggcttcgttaatggtggtattttacagtaagatttcaaaaatgtgtgttcaatattttgaatacgttttttgttataattgaggttgaataaatccatttttagaagaggatgctcataatgaagaagattgtagttattggttcaagtaatgttgatacaacattacatgtaaaagactttcctaagcctggtgaaacaattaatgcgctagacattactactgctggtggcggtaagggtgctaatcaggcaattgcagctgctaaaagtggagctgaaacttactttattaaccgtgtaggtgaagatagtgaaggaaattttatcacgcatcagctcaagagttatggcgtggacacaacttatgtgcaaaccacaatgggagcaaagacaggccatgcttatatcacgttgaatgaagctgggcaaaatgacatcattattgatcacggcgcaaattatgaactgacagtggaagatatccgtgcagctggtgatttgattaagagttgggattgtgtaattgctcaattcgaaatcccactagatgtgacgcttgaagcatttaagattgctaaaaaggccaaaaaaatcactattttaaatccagctcctgcagttgatgagattcctaaagaattactgcaatatactgatatcattacaccgaatgaaactgaaagtgccaagatcactggcattgcaattaaagataattcaacgctggccactaatgcagaaaaactacacatgcttggtgtaaaaaacgtggttattacctatggtgataagggtgcgtatatttcaactcccgatgttgaagaattaataccgacttataaagttgaagcagccgatactactggtgcaggagatacctttattggatatttggtaagcaatttaaattctggcctatctaactttgaagaagcagctaaaattgcaagtcgtgcatcttcaattgccgtacaacgtttaggtgctcagccttcaattccaactgaacaggaagttaaacaggcgatggaggatgatgaataatgaacaagcaagaacaagatcgtttgaaaaaagaagcagcagaaaaagcagctgccatggttaaatcaggtatggtattgggcgttggtacaggttcaaccgttgcctttttcattgatgctttaggtaagcgcaaagatgaagacggcttaaaactgaaggctatcgtaactactagtaaccgtagtaaaaaacaacttgagggcttaggctttaaagttagtgaattggccgatattgatcaagctgatttaactgtagatggtgctgatcgggttaccgataacttggatggaatcaaaggcggcggtggtgcattaactttagaaaaaaatgtagcaatcaattctaagaagatcatttggatcgttgatgaatcaaaattagtgcatcgtttaagcggcttcccattaccagttgaagttttaccaatttcttgtgaacaaaactttaaacgttttgaacaagaaggattaaagcctcggtggcgtatggatggcaatcaacgttatgtgactcactatggaaattatattattgatttggctgcagatcctgttccagcacctcatggtttagctgattaccttgatcatactgttggcgtagttgaacatggcttgttcctggatatgtgtgacgaagtaattattgctcatagtgatggcaccatcgaagataagaaaaagtaaattaagtgactgaaggagatttcatcttcttttttatttttcaaaaagatatatttttattgcaaaaaatctagactttttctatactagtaaaaatttcaatttttaagtgaaatagaggataaaaacttatgaataaaatatctggtaagcaaaaggtgtcttttactggccttttaattgctatcggtattgtctatggtgatattggtactagtcctttgtatgttatgaagtcgattgtgactgaaaatggtgggattagtaatgttaaccgtgaactaattgttggctccatttcgttgattttttggactgttacattattgacaacggtcaaatatgtgataattgccttgaaggcgactaatcatggtgaaggagggatcttctctctttatgcattggttagaaagagggctaaatggctagttatcccagctttaattggtggagcagcattgttagctgatgggacattaactccagctgtgactgttacaacttcaattgaaggattgaaaaatatgcgctttggtgatgtaattccagtttcgtcgcaagatatggttatcttgattactattgttatcctggttttactattttcaattcaaagaatgggaacgagtgtgattggtaaggcctttggtccaatcatgctcctgtggtttacttttttagggctcattggatttatgaacttaagccatgattggagtttgcttgatgcaattaatccaattcatgctttgcgtattttatttagtcctgctaataaagtgggtattttgattttaggttcaattttcttggcaactactggtgctgaggctctttattcagatgtcggacatgtcgggaaaagtaatattatgggctcttggccttatgtgtttgtttgcttgattttaaactatttagggcaaggcgtctggattttacaaaatgctaattatcatgctggtaatggtgatttcaatccattttttgaagcagtaccaagtagtctaagattgtttgctattgctttggctacgattgccgctattattgcttctcaggctttgattacgggttcattcactttagtagctgaagcaagtagtttaaaatttttaccaagaatgaatattatctatccttcaaatgagaagggacagatttatattccttcaattaataagatgatctgtgtcattacagttgcaattgttttcttatttagaacttcacatcatatggaagcagcatatggtctggccatcacggttaccatgttgatgacaactatcttattatttgaatatctgggtaaaaaaggtaccgcgctatcaatacgatgcattttcttagtagtctttgcctttattgaagggatgttcttattctcaagcttaactaagtttttgcatggcggttacgtcactgttttaattgctggttttattttggcaatcatgtacgtgtggttctatggcaataagatccgtgataagcgtgaggagcagaatgcttatgttcgcttagatgaatatacagatatgttgactgagttgagccactgtgatgattatccagtttacgctacgaatgtagtttatatggctaaggttaagtataataaattcattaagcgcgaaatgctttattcaattttggataagagacctaaacgggctaaggcttactggtttgtaactgttaatgttactaacgagccatatactgcagaatacgcggtcaatacttatggtactaagaatgtaattaacgttcagttgtatttaggttttagaaaacaaaccagtgtaaatgtttatttgcggcaaattgttcatgatttgatcgctgatggaacgattgaagctcaaccacaacaattcactactacaccgggtcgtgatgtaggggacttcgcctttgtaattgttaacgacgtaattagtccattaactaaattgacaggctatgaaaagttcatggttgaagcaagagtatggctgcagaatttatcttctaaccctgcatcttggttcggactggagtatgccgatactgtggttgagcgtgtgccattagtattaggtgaccatgaagaagaacacattcaacgtattaaacccaaaaaagaaaaataattattagaataaaaccaaccactttcttaattggttggttttttgctattataaaagtacttaatacgagaggataattttatgaacaagaaacctttaattatcagtactgatcctggcattgatgacattgctgccatgacgattagtctttttgcacaagaacttgatgtgcgcatgattgtgcctacttggggtaacgtggcactgaaatataccttgcaaaataccttaaatttagaaaagtttttgcatactaaggttcctgtcgtagtgggtgctaatcaaccactggtggcaccaatgattagtgctgcttcggttcatggtaaaacagggattgccggctttgaatttgaacaagctgatgattctttaattgaacctggtcttgctgcaacgttgatggctaaggaaattaaaagtagtccagaaaaaataactctgatgggcattggaccattaactgactttgccttactttttaagcaatatcctgaagttaaagaaaatattgcggaaattgtaattatgggtggtaatattggtcacggaaatcatagcccatttgcggaatataatattgcgggagatccggaagcagcgcaggtagtttttcatagtggattgctagttaaggttgctccacttgaaattggaaataaggcccatttaacaccagagcaaatggataaagttaagacatgtggtgaagtgggtaatatgttgtattcacttttctctaacattcatgaaccagacggtgatccgcgaattaagatttatgatccgactgcagttggaattatgcttcatccggaaatgtttacaatgaaaaaggcaaatgtgaatattgaattgcgcgggcaatatacttatggtgccagcgtaatggattttatggaccaagaacatgccaatgcggagattgcgacagatgtggacttggataagtttgcaacttggtttattgatagtattaaaaaggcagatcaaggacgagaataatggcagattatgtttatcggacagttatgcatgacattaaacagaatattttgaataatcagtataaggggatgcgactgcctgatgaacgcagtctagccgaacactatcaggtaagtcgatcatcaatgaagcgtgcgctggagctgttggctcaacaagggatcgtttttaaaaagcgaggtagtggaacttttattaatccactatatttgcgcaaacaggcaatgtttcgttatgatggatcgaatcttggaatcactgattcttttaaagtccctggtaaaaaacaacaaattaagttgcttgattttcatgtgattaaggcaactaaagaaattgcggaagacttatttttaaatgaaaatgattttgtttatgaattcaagcgtctgcgactgttagatgaacaaccatttttaattgagactggatatttgccgattaaaattgtgccggaattaaagccagagactttacaaaagtctttgtttaactatttggaagatgaacagggaaagaccgttactaagtcattcttgaatatcactgttgaaccatcgaatgaagaagatcagcagaagctaaatttgaagccgactgaacctgttggtgtaatggaagggatcttcttcttggatgatgggacgccgtttgaagtatcaaatatgcgcgtgcattatcattatatgaactttaatacctttgttaatttgggtaaataaaaagtagctgtgttttcttaagtcaattagtttaagaaaacttggctacttttttattttgctcattcagacggttttagtttacagtaattattatttctctactttagctaaatatgaatcaagcacctctaaaaccccatcatcattgttactcggggcctcatacttggcgattttcttaacttgatcttctgcattagccatcgcataactgtaaccggctagttttaacatctcagcatcattcattccgtcgccaaaggcaattaattcattgggtttagcaccaaaatagcgtaagaagtattttagagcgctccctttattaacgctgtaaggcacaatatcaagcaaaccgaaaccactagaagtacagtgaatcttctcggcatgggtttggttgaattctttttctaattccgcggaaaaatcatattgataacttaaggtgattttagtaatcatatcctgcggattgatagccgctgctaaatcagtaacttcaattcgatcggggtaatagaagttcatcgtctgcttaaaactaggagaagcattaatagttgtatatgaattgttgatcccagtgacaataattgaactcttggaataatgctctttgataaaacttattagatctaaggttgttttataagtgagcaaatgagtgctaataatttgattatcttgaagcaaaagcgagccattgtcagcaatcatgtcgattcggtttaaaaagccagcaaaatctttgcgtaatctggtataagggcgcccacttgaaacgataaagtgaatcccctttttgtgtaattctgttaagatgcggtcaaagcgcttgtgatcgaaagtttgatcatcatgcatgaaagtgccatccatatcgacagcaacaactttgaatggtaattttgtcataattatttcctttgaaaaaatctatatcttttaacaatattattgcataaaaaggccgagcagatcagctactcggtctttttggattcattttttcatctagagcaggttctagatacacttaaatattaacaaattgttctaccgaagtgagcggactcagataaacataagaaagatttacatatttggtagcgtcacttagctttttcattaggtcttgctgttcatgagttagatgcaggtgattcatggcaattcgagcctgaatatacatgaccaatttgctagtgtattcaagaggatgatcaccactgtcgaacttattaagaacaagcccaattgcatcgcgaatctgccgatagcgaccaatattcatttcattgtagatattgctaaaaaaactattataaaaattcttcaaatcttggtatacttcacgactttcgctttgtttcttttggttaaagagactgaacataactatcactcctttaaaacaggtataatttgcgtttttggattaaaatgatgctttaattcctcaggcaatggggtgtcggtaataaggacatcgatctgattgagggggacagacatgtatggcgaagaggattgattagtaaatttatatttttcggcaactaatacaacttgattagcgcgactagcggcggtttcgacaattttggaatcagccatgcttggtgtatatgcgccgtcatctctgattcgagatccaccaataaatgcagtattgaaatggatttgacgcaatgtttctaatgctgtttcagaataaatgaaacgctgctttttgttgataacgccgcccaacaatctgactgatgggatttctattgctaataagcttaatgcgttgtcgattgaattcgtgacgatctgcatgtcaataccattaagcattggacagagctgctttaacgtagttgatgaaccgatgaaatcacattgacctggatgaacaaatctctttgccattctagccattttcatcttaaccggtgattgtacttgatttcttgctaaaaaatcaggtacgctgttgcaattaatttccatcaaaccaccatgaactctaattgcttgaccagtttcagttagatgaattacatctcgtcttgccgtatcaaatgatacattgaagtgagctgcaatctgtctagttgataattggtgcttttttttaagtaactgtttaatttgtattaatctttcttcttgggtcatctcatgccctccatttagtaatctaacatgaatgaataattttgcactgattatgtcagtatttgatatttgtttatctgtacttatcagtatttaagcaactaaatacttatatcaaagcattaaaaggttgatatagcaacaaaaaagggatgcaattttaaattaaatacttattttttaattggtaggatccaattataaaaatagttgaactttttagataatttggtatgatataagtgtaaacaaaagaacaaatgaaaaagagcactcttagatgctcaaaggagaataagatggcagttgattatgactcaaaagactatttaaagagcgttgatgcttattggcgcgcagccaactacttgtcagttggtcagttgttcttgatgaagaaccctcttcttaagaccccattggttgcagaagacgttaagcctaagccaattggtcactggggcactattgcaccacagaactttatttatgctcacttgaatcgtgtgcttaagaagtatgacttgaacatgttctatattgagggttcaggtcacggtggtcaggtaatggtttctaactcatatcttgatggttcatatactgaacgttacccagagattacccaggaccaaaaggggatggctaagctattcaaacgcttcagtttcccaggcggtgttgcttctcacgctgctcctgaaactccaggttcaattcatgaaggtggggaattaggctactcactgtcacacggtactggtgctgttttggataatccagatgttattgccgctgttgaaattggtgatggtgaagctgaaactggtcccttagctgcttcatggtttagtgacaagttcattaacccaattaaagatggtgcagttctgccaatcttgcaaatcaacggctttaagatttctaacccaaccattgtttctcgcatgagcgatcaagaattaaccgaatacttccgtggcatgggctgggatcctcactttgtttcagtctttaagggtggtcgttttgacggtgaaaaggacccaatgcaggttcacgaagaaatggctaagaccatggatgaagtcattgaagaaatcaaggctattcaaaagcacgcccgtgaaaacaatgacgctactttgccacactggccaatgattatcttccaatgccctaagggctggactggtccaaagaaggacttggatggcaacccaattgagaacagcttccgtgctcaccaaattccaattccagttgctcaaggcgatatggaacacgctgatatgcttactgattggctggaaagctacaagccggaagaattgtttaatgaagacggttcacctaaggaaatcgtaactgaaaacactgctaagggtgaacatagaatggccatgaacccaatcactaacggtggtcttgatcctaagcggcttaacttgccagactaccgcaaatttgctttgaagtttgacaagccaggttctatggaggcacaagacatggttgaatgggctaagtacttggatgaagttgctaagctcaacccaactactttccgcggctttggcccagatgaatccaagtcaaaccgtctgttccaattgcttgacgatcaaaagcggcaatgggaaccagagattcatgaaccaaatgatgaaaacctggctcctagcggtcgagtaattgattcacaattgtcagagcaccaagatgaaggctttctcgaaggctacgttttgactggccgtcatggcttcttcgctacttatgaagcctttggccgggtagttgactctatgcttactcaacatatgaagtggctcagaaaggctaaggaacaatactggcgtcatgattatccatcacttaactttgtcgcaacttcaactgtattccaacaagaccacaatggttacactcaccaagatccaggcatcttgactcacttgtatgaaaagaaccgtccagatcttgttcatgaatacttgccatcagacactaatacgcttttggcagttggcgataaggccttgaaagatagagaatgcatcaatgttttggtaacttctaagcagcctcgtccacaatggttctcaattgaagaagctactaaattagctgataaaggattgagttacattgactgggcttcaactgataagggtgctaagccggatgttgtctttgcttcaactgaaactgagccaactattgaaactttggccgcaattgatattttgcataagaagttcccagatctcaagattcgctacattaacgtagttgatgttatgaagttaatggatccaaaggacaacaagaatggcttgtcaactgaagaatttgacagattattccctaaggatgtaccagtaatctttgcatggcatggctacaagagcatgatggaatccatttggtttgctcgcaagcgttacaatgttcatattcactgctatgaagaaaatggtgatattactaccccatttgacatgcgggtattgaatcatcttgatcgctttgacctagctaaggatgccgtagaaagcatcccagctttgaagggcaagaatgcggacttcatcagtcacatggattacttgcttgaaaagcaccaccaatacatccgcgacaatggtaaagacatgccagaagtaaccgaatggcaatggtcgggcttgaagtaaaattaaaataagaataaattagacctatgcgaaaagcgtaggtcttttttgataaagagggaaaatatgaaaagtgggttagtacttgaaggtggagcaatgcgtgggctgtttacagctggcgtaattgatgtgtttttagaaaatgacataacctttgatttagcaattggcgtttcagccggtgctgcctttggcgtaaacttgaagtcggagcaaaagggaagagtattgcgctacaacatgcgctttgcggggaaaccatattatgctagttggaaatcatggcggcggtcaggcaatttgtatgcggctaacttttgttaccatattttgcctgataagttggatgtttttgataaagaaaaatttatgactaatccaatggacttttggtgtgttgcaactgatgctgcaacaggtgagccggtttatcatcaattacatgatgcaggttatgttgacttagagtggattagagcctcgtcgtcgattccattttttgctcatccagttgcaattcatgggcattattactttgatggcggtgtatctgattcaattccgtatgattttttagagcagcaaaactgtgataaaaaggtagtcattgctacacagccgaagtcttatcgcaaaaagcagagtaagctctatccactggaaaaagtaattttaaggaaataccccgcagtagtaaaaaaattggctactaaagctgaggattataatgcggtgcttgatcagatggtaaaagatgaagctgctgaccaagcttttattattcgtccaccgtttccgcttgaaattggcactttagaaacagataaaaaagagatgcgacgagtgtatgaggtcggacgagttgaggcggagaaagttttgccagctttgcgtgaatatttgaacaaataataaaacaagtatctaggaaagattaatcacttctcagatacttgttttaggttgttcataaaaatttctcaaaagcattgctgatgccatcttcgtcatttgaagtggtaacataatcagcatgctttttcgcttcttcggagccattacccatgcaaacagctgttccagcaaagtcaaacatggtaatatcatttctttcgtctccaattgccatgacctcttctggagtaatgccaagtttttcagttaattcttttaatccggttcctttattaacattagggtgaagtagctctaagaagcaatcgtcggcacgaacaatatacagctcttgcccaaattcttggcgaattttatcctcccattggtctaacaacttagctttagtggcaaaacaacctttagcaatttcaaaatcactaggcaattcatctagctctctaatgtataaagtcgcactattttcgtaagcttgagtataaaccattaaatcaacatcatgatctcctgtaattatttttgaatcaggggaaacaacgttaaaaggtaaatgatgctcgttagcaaaagcatacattttacgataaagtcgattagaaactagatctttagtcattatcttgccatctgctgtgcgggtaattgcgccattaagagtgatagcatattgattaggtccaataattcctaattcgtccataaaatgttttaatcctgcgattggccgaccagaacataaagcaacttttattccttggtctaaagctgttttaactgccttttttgtactgggcaaaatcttacctgttgaattaagcaaggtaccgtcggtatcaagtgcaataaatttgattgtcataataattcctcctgtgcatttaacttaccgttaattatgccagactttgtgttatttcagtaagcaaagtagttcatcttggaaaggaaaaaggttttatcacttgtttcgtttcatgaaatgaaatatatttcagaggattttatgtgtataaatagagaatgtctatagcatatttattgacatgttatttttgtatgtaaagtaaatgattaaacataggcgcgacaagcaaaataaaggggtataaatattggtatatacatcattgaagggctgaaataaatttcatgaaatgaaatatcatcttaactttatgaaacaataagtcatagttttaaaaaacgcttacattagcttaaaactatggtataaataaaaatgtaagctagctactaagatagagttaagttcagaatttgatatcaactggacgttttatcttaaaacatttttgaggagtaaatatttgtgtgaagcacaaatggcaaaagtcaattgtatgagcaccttgcggttgacttgatctgatgaaataaagatgtagatgcaggtgtagatgtaagaataagttattgatttaatttttttcttcagaggtaaacgattatgatgcagaaaatacagcggtttggggccgctatgttcgtcccagttatgctgttctcgtttgcgggtattgtcgtagctttaggtagtttgttcaataacccgactctgtttggtttaattgccaacccgggaactacatggaactcagtttgggacacaatttcagctggtggttggacagtgttcaaccaagaaggtattttgtttactgtaggtttgccaatcggtttagccaacaaggctagaggtagagcagccatggaagcagttattgcttacttgacttacaactacttcatcggtgcaatgcttacccactggggtgcagcttttggtattcctaactttgacaagatccaaattgttgctaacgctactaaccatggtttaactaacattgctggtatcaagactcttgacactagtatcttaggtgccttggttgttgctcttattgtagtgtggttacacaataagtactttgataagaagttgccagactggcttggtactttccaaggttcaacttatgtctacgctttagcattcttcgtaatgattcctttagcactcattacctgctggggctggccaaaagttcaaatgggtatcaccagcatgcaacacttcatcgtagatagtggatttatcggtgtttggatttaccaattcttgaaccgtgtattgattcctactggtcttcaccacttggtatacattccattccaattcggtccagccgttgttgccggcggtttgcaaccatactggttgaaacaccttgctgaatacgctgcaagtactaaaccactttcacaaatcgcttcagttgaaggattccaactttacggtaacgaaaaggtattcttagtaccatttatctgtcttgccttctacgcaactgctaagaagaacaagaagaagcaaacttcagctttgcttatcccagctgctttaacctcagtattagctggtattactgaacctatcgactttacttatttgtttgctgctccagttctttgggtagtttactcagtattgtcagccacgatgaacacagttatgtgggcctttggtttaagaggattcatgtcagatggtgcgatcggtatcgcttcaatgaactggattccactttggccaaaccactggaagacctatgtgatggaatttatcgttggtattatcttcggtattattacttactttgtcttcaagatcatgatcgagaagttcaattacattactccaggtcgtgaagccgatgatcaagatgttcaccttctttcaaagaaagaatacaaggctaagaaggctgcagaagctgctggtaaggacgctaatgacccttacattgaaagagcaactgcttaccttgaattattaggtggtccttcaaacattacagaattgagttcatgtgctactagattacgtgtatctgttgccgatccaaataaagttgcttcagatgccgcatttaaagcaaacaaggctgtcaatgtcgtacaccacggtaaggctatccaagttatcgtaggtttggacgtacctcaagttcttgatgaaatgaacactttaatgcaacaacaaggtggcgacgctaaggtatcaactgaacaagataatccttatattgaaagagctactggtatcgttgacttgcttggtggtgactccaacattcaagatgtcattgcttgctcaactagagtaagaactcatgtcgttgatcctaagaaggtcgctccagattcagaattcaagaagatcgcagattcttacgaagtacaacataaagataacaacgaggttgacatcgttgtcggattggatgccgatcaagttgttgatcaaatgaaacaattgctataatctgaaagcgcttgtgttatcattaatatataaattatatattgataagggcacaggtattatggcaaatttgagatcaatggtctatgacaatagtcataagttgaatgattctgaaaaacagatagttcaatatgttctaaataatccgagagactgtagcaaattaagcttagccaaattagctaaaaagctttatgtatccgaatccgcaattttccggttatgtaaaaagctaggactaagtggctacagtgagcttaaatttgatttggtcgaattagccgaatcgaagcaaaaaccaatcaaaattgaaaataattttgcgcgggaacttagtaaagtaaattcagacgtgttgaagtatttcaaacaacgtgatttcaatagcttgtatcgcgatttagataatgcagggacaatttacatttactctactggttggcaacaagagttaatcgcacaatatttggctcatgaattgtttgtagttggcaagcatgcaactgttttgccatcagcattagaggagttaaaagctgcgggacgctttgctcaaaaaggcgatgttttgtttattatctcgtttacgggtgataataaaacgatcaatgaggaaatcactaagttggaactagtgaatgataaattcaaatatgtttcgttcactaacctgaagcaaaataaattagcttcattagtgcagcacaacatttattttccaacgattgcctttactgatgatgccgactttaagagcgggaaggttgcctttaccccagcgtacttcttaattgatttggtaattagtgaatatgtagcttggcaacagagtcaaggagaggatgtagagatcaatgtgggcaattagtaaacgaaaagttggcaactttatcgatcgaataaccgaaagcatgcacttggatactaagaagattttgacttggtattcatacgtacttttcattgctccactattgttttgggcgatgattgcactacgaagcggtgcttctggtcaatcgattcggatgatgattatgaagcagccgatgattgcgattagtacaatcgttgctatcgttgacttcatactaggctactatatgttgttaaaccacaagcagtttttaatcaatcgacagacttatcgcttcttgatgggaagtcagatgattgctcagctctttgttggcaacttgctttgcgtagtattagctatcttaggtttttatcgagcaagagctttgaagaagacacaagatggcgttagtcgagtaataatcgcaatttcacttactgcagctggtttattactcgcaagctttatgttgatattattacttgaattttagaaatccagaggttattaattatgtttaatttctttaagaaaaagaataagggtattgaagtagatgcggtagttgacggcgacattatgccaattactgatgtaaaagacgatgtcttctcaactaagatgttaggtgatggctatgctatcaagcctaaggataatcatatctatgcaccagttgatggtagtatttccacactcttcccaactaaacatgctattggtatcacgaatgaccaaggtattgagtttttgattcacttgggtcttgatactgttgaactaaaaggtgctccgtttacagtgaatgttagtcaaggcgataaagttaagaaaggtcaacccttagccacaatggatttccaaatgattacagacaagggatacgatgacagctgcatcgttgtctacaccaacatggacctgattaagtcagttactccgattgaaaaaggcagtgttgaacattcccaaaaagtacaaactatcgaacttaaatagtcaactttcccctctctcatgtaaaaatttaacgactatttctctagttttcggcttagcttctacgttgaagctaagctttttctgttagaatgttaattaagaaagaagggcatttatgaaaagatatcgaccgaacactaaggcagtcattgtgggtatagttttgatgttaattggtatagcatgctgggtaattaaggcatcatttattcctaagggagcagacttcttgtttccgattggcttacttgtgatttgtcttggcggattaactttaaccattactgcgtttattgctatgcgaaaaaatgatcttgcaatgagtgcttatttaaaaaaacaggcagcagaaaagaaaaagcaagaaaagagcaataattaagctttttaacagttttttactataataaaatatagattgttattatataagcaaaaaggaattgaggaaaaatgaattttaaggatgtttatgaaaaggaacatgtaacgcggaagtttactaatagaaaattacaagaaaaaacaattgctggaatcgttaaaatggcacagcaatcaccttcattgcttaattctcagccatggcgtgcatatgttttgatgggggatgctttaagcaagtttaaggctgcttcagctaaaaagattgatgataaagaagttgcacatgaagattttgcttcaatgctatcactagattgggatacttatccaagtcgtaatatggctacgatgggtgcatcccaaagtttctttttcagaaataagcttcaattatttaatgatgcgaataaaacaatgttcaatgcaccagcaattatctttttaacggttccgaagaaatctccagcttggtccgtttttgacttaggaatttttgcacaaagtatcatgcttttagccattaaccgtggcttaggtgtgatgccagctcactcaatggtttcatacccagaattggttagagaatatgcccaaattccagatgatgaagctgtcggaatggcaattgcagttggctatatcgacaagaatgctgaaattaatgatcctaaatttattccaaagcgtgtaccgtttaatgaaatttacaaggtggtcgaataaattacaaaaaaccgttatcccttgtgtaaaactgcactattttaggcaagaaatggtaaaataggttttagtaatatatttgtaaaaaaaggtgataatactttgagtccagctcaaatagtaactaatttagttgcaacattattaatatttatcgttgcatcattctttgttgctgcggaatttgcgttagttcaaactagaccaagtcagctcgaagatatgcttgctaagggtcaaggaaataagaaaaagttgcgtcgtgctttgcatatgacgcacaacttgaatgagtatttgtcaactactcaggttggtaccactttggttggtgtagtcttgggttggttctcggctgatacattcgcaaccatattggaagatcttttccatttgacgccaatgaatgattcactcatcaagtcagttagtgcaatcttaggcgtagttttattaacttatttggaagttgtcttaactgaagttgtgcctaagaatattgcgattgacaagccagtaccgatgatgatggggatcgttacgccacttcatattttccatacgattgtttatccattcgtttggctattaaatactagctccaatggaatcttaaaattgatgggctttactccagctgatgaagaaaatgaagtttattcacaatctgaaatcatcaagttgtcgcgtaatgcggttcatggtggttcgcttgataaagaagacttaacttatatggaaagagctttcgaattaaacgataaggttgctaaggacatcatgactgacagaacaagattgtcagtacttgattcaactgatacaattgcctatgccttgaaaaaatacttggaagaaggctacagtcgttttccagttgtgcgtgataatgataaagatgacgttgtgggttatgtttatgcgtacgacattgtgcaacaaagccaaattgatggcaacgtaccagtaacaagaattattagaactattatcacggtacctgaatcaatgccaattcaagatatcttgcacttgatgatttctaagcacacaccaattgtcttagtagttgacgaatatggtggtactagtgggatcgttactgataaggatatttatgaagagcttttcggttctgttaaggatgaaattgatgatgtttcagatgattacattatcaaggacaaggatggtcaagttcatgtttcaggtaagacgactttatatgactttgagcgtttcttccatacagatctgaaggcctttcaagatagcgatattattaccattggtggttacatgatggaacattatcctaacttgaaaaagggtgaatcaattgaacttgaaggatataagtttaccttagacagtatcgaacaaggctttatgcgctggtttatcgttgaaccgattaaggataaagatcaaaaagacgatcaatcaaaggatgaaaattagaaattattcagaggaagcgttgaaaatgacgctttttttgtttaaagatgttataattctttttattaggaataatatatgtaaattgaattgaagggtagattaaatggcaaaaggcgacaatattgaccaaattatagatcacaaattattcacagaagatgacattcatgagatgtgcgtccgtttaggtaagcaattaactgaggactatgctggtaaaaagccggtagttgttggggctttgaagggtgcaatttacttcttgactgacttaactcgacaaatggacgtagcacatcaactggattttctcgatgtttctagttatggtgatggctttgagtcaactggtaaggtcaagatagtatcagatttggtaactgacgtgaaggatcgcgatgttttaattgtcgaagatatcgttgatacgggtttaactttgaaattcatgaaagaacacattatggcacgtggcgctaagagcgttaagtgttgtgcaatgctaaataaggaagccagaagaactaccgatgttgaattagaatattatggttcaaaggttggcaatgaattcgtagtgggttatggtttggactttttaaatatgtatcgtaaccttccttatgttggggtattgaagccagaagttattcaacattacgctaataaataaggatgaaaattagataaagaatcaagcgagtgagaatgatcactcgcttttatttactgcttttgataaaaaaattctattaaaatatcaaattaaatttattttttagatttaatattgtggttataatataagcggtttagtaaaaagaacaagtaaaggagtagtttttatgaccaaacaaactattaaagctcaagcagatggtcgcaatggtcaaattgattttgagattgacttagaaaacaataaaattagtgatgtcaaagtaaccaagaattcggaaactcctgcaatttttaatcaaacttttggtaaattaaagaaaaatattattgataatcaaagttttgacgtggacgctgtttctggggcatcattgatgactcaagcaatgctagattctggtaaaaaagcattagccgaaaataacattgctcttgacggaaaaaagccagaagtcgtacatgaagaaaggcaactaaatgttgatgtggctgtaattggctccggtatggccgggttaatggcggcaagtcgtgctctttcgatgggtaaaaaagtagttgtacttgaaaaaaatggctatttaggtggagcaactattttaaatggctcaaatgttgtaggaactggctctaaagtttctgcagaattatttggtgaaacggcaaagaaggattcgccaaatagactagttcaagatattactcgtgaatgccgcggtactaattatccaatgttgtcaaagctattagctaacaatattgggaaggcagtagactttattactgaatttgcaaatttgacttatcaaaaagcggaaacccaaacagttgaacatagtgtatatcgtcaaattgaaatgcctagtgaaagctcatatgaactagtgactaaggtggctgaggcatttgaaaaaaagggcggacaaattatcttagatgcccgtgttgaaaagttgaataaagataaggctggcaaactggtatctttaaccgctgaaggcaagcaccagacaattaatgtcaatttcaagtcacttgttttagctgctggtggttggggtgcacgtgattatcaggctcataagactgatattccatattatggtccaatgacttcaactggtgattatcttgattttgccaaaaatatgaatttggttactcgtaacttagactggtataaggtatatccacatggattggaagttgaacctggtattgctaagctaacaacttattcaactaaagaagcgaccgatatgggggctatttttgttaatactgatggtaagagaatagttaacgaatctgcaccttatacgcattttagggatgcgattgctgaacaaaagggtaaggtagcttacattgtcatggatcaaagaacctgggaccgtttctatgaattaatgcttaagtatggctttaccaaggaagaggttcaatcattctttgatttggttggcgagaagagtccagttctggtcaaaggcgacttgaagaccgtggcagaaaaagcaggtattgattatcaaacgctgaaggaaactgtggataactatactgaagatgttaaagcagattatgatcctgagtttggtagagacaagaagtttatgcatgagttcgaaggcgatacatattatgtaattgaacaaaaacttctgttctgcacaactttgggtggatatgaaactactgatcaaatgcagcttcttgacaatgatatgaatcccgtaagtaacttctatgctgcaggagaaattgttggtggtgctaatggtcatgattcaatgccaagtatgatgaattcttggagctatgcttctggttttgttgcaggtacgactgctgcggataataccaattataattattttactgtttcaaatgaacaagaagcagatgctgtatcaggcgcctctgaagcttaatttaaatactgaaacttgaaagcaccaaaatcaagctcaagtcctgtcactattgagcttttctagacgtaattagtttttatatgatctgtttcagtgcaatttgtatgaatcgtggcagttggttaataaagtcattgattacttcatctatcttttcaaaactattctgtttaagctcttttaattctgaaattaagtagaccaatgcatctacgaatctaatatcaggtaaggattcgttcattagatagaataaatctccgattgtcttatcatctgtattttgtctttcctgccaggccaatagatcataagttattgctgtaactgcgatatagccacattgtccatcatagctttgaacttgagatttatctaaagcaagatattgcttatacgtcttaaaatatgtttcaatttgccatctacgaccataaagttggatgatttctttaggtctaagctttgtctgagtagtagctaaaactaaatacttgttcttgtttccacggttggagacaaaaacgagctttaataaaaagatatgtccatgatattgagcctcaactatgcttgaataaagataatgtttctttttacggatgtttgaagcagccaatgagccgagctgcaatcaagcataatagtttttgccagttgattcttccatcgttaagtacattgcgagcagttctaacggaaaaacgcttgtcactcttagctctgaataaggaaagccgagcaaaatgtacagacatcagccaagagataatcatggttaatgaaacggtagatttacgcttaaagttgacttgtttagtcaacttagctagaccaattagattaataaatgaagaaattaaggatttggtatcgttttctgtgtcgatttgttctatactgttcattgcgtaggatctcctttacttttcaggttgacacttaaagtataacgcagagagatcctgcgtttttatttttgataagaaaaagccaagaggcgcggggaaggagcgttaatcttagctttcaagtttcagtttattaattaaatcatgcaattaaaaagtttaatgtggataactatttgcattaagctttttttatttggagaacgaaacatagttatctcataacaattttattatgaaagtatagtgaaattgatatttgatacatcaacagatgacgcactaatattaacttgtggataaaattaaacttattagaggtgtaagcaatgaagtcaggaaaatatcaagtaaaagctaaaggtcatggttccgaatcaatgccaatggaagttgacattgatggcgataaagttacttcaatcaaagtagattcatcaggtgaaactaagggagtagccgatgaagtatttagacgtttgcctaaaacaattgtggaaaatcaaactttaaacgttgatgcggtcagtggcgcgactatttccagtcatggtgtgattgatggcgtagccgaagcaattgatgaagcaggcggcgattcaaccgaatggaaaaaccgtgaaaagcccgctgctacaaaggtagaagatgaagaaattactgttgatgtagctgtagttggtgcaggtggcgctggtctagcagctgcagttcgctcaattcaacatggtgaaagggtggctgttctcgaaaagtatccacagatcggtggtaatactagccgtgctggtggtccaatgaatgcggctgaaccagaatggcaaagtaaatttaaggctcttcctggtgaaaaacagactttagaagacttggctaatacgccaattgaacaaattgatttagaataccgctttgattttgaaagattacaaagacaaatcaaagaatatattgattctggtacagattatttatttgattcgactttactccatgaaattcaaacttatttaggtggtaaaaggactgatttaaaaggtaacgaaattcatggtaaatatgctttggtacatgaattggtaactaatgctttaaattctgttaaatggctccaagatttgggtgttaagtttgataattctcaagttacagaaccagttggtggtttgtggcgcagaggtcataagccagtagagccattaggttatgcctttattcacgttttgggtgattggataagagagcatggtgtcgatccatatcttgaaactcgtgttgaaaaactaattattgaagatggcaaagtacgcggtgtaattgcgacacgcgctgacggtagtactttgactgtgcatgctaaggcagtaattttaacggcaggtggctttggtgccaatactaagatggttcaaaaatacaatacctattggccaaacattgcagacgatagtacgatagtacaacaactaattcacctgcaattactggcgatgggattaacttaggtcttgaagctggtgcagacttattcggtatgggctttatccaattaatgccagtagctgatccaaagaccggtgagcttttcactggtgttgtaactccgcctgctaactatattatggttaacaaaaagggtaagaggtttgttaatgaatttgcggaacgggatgttttggctaaggcagttatcgaaaatggtggtttgatttatcaaattgcggacgataagattaaggacactgcttacaatacaacccaagagtcacttgatgcgcaagttaaggctggaaccttgtttagagctgatacgcttgaagatttggcaaaacaaattggaatgaatccagcagttttggttaaaactatccaggattataattcttacgttgatcgtggcgaggatccagacttccataagaatgtattaggcctcaaatgtgaagttgcaccattctatgctactccgagaaagcctgctattcaccacactatgggcggcttagtaattgatactaaggcacatgttttgaataaagatggtcaaattattgatggtctatattctgctggtgaaaatgctggtggcattcatgctggtaatcgtttgggtggtaactccttggcagatattttcacttttggtcgaattgctgccaatactgcctatgaagatcatcaagaaaatgatgcaactagcggtgcttcacaacattaataaatatatttactccccggatttaaaattgaagtgcaacactaagtgttaaacaaaaaggccatgaagacctaaacttgaagtgacgaaaaatcaagaaaggaagatctttatgaccaattcaaattctagcatttctaagcactatcatcaattaaccagcgtacaacgtggacaaattcaagcaatgctggattccggcataacttcccgtactgttatcgctcaagaagtcggctgccataagtcgacaatcagtcgcgaaatcaaacgcggaagtgtcctgcaaagagacagcagctatttattgtatgagcactattacgctgatactgcacagatttattatgagaagcgtcgcaaaaactgctatcagcgcaatccattgaagcattatgctgtctttttgagaatgctctccagacgctttaaagctaaatttgatgccaccagcatcgatgagttcgttggtgaattcaaaaggactatgccaggctacccttgtcccagcacaccaactgtctatcgctatattgatcagggcttgctggacataagcaatattgatctgcctatgaagctcaaaagacgcaggaacaagcgtcatcacagccatggcggtcacgctttgcacaagaagcatcttggcaattccattgaacagcgtcctaaagagattgaagacagaaaagctccgctgcactgggaaggagatctggttaaaggcgtcagacgcaagaatcagcctgctttaatgactttgactgaaagaaccacacgctttgaagtagttatcaagattcctgactatcgggcaagcacatgccaaaggctgcttcaaaaggagattgacagacatcctgcctggtttaaatcaatcacgtttgacaatggctctgagtttgcggatatgaccaagatcaagggctgccagatttactttgctcacccatattctccatgggaaaggggcaccaatgagaactgcaatggtcttttgcgtcaattcttccctaagagcaagagcatgaaagacaagtcaaaagcttatgttcaacaggcaactgatgccattaaccacaaatatcgccgaatcctccaatatcacacagcagagaaactcttcaagcaatatatctcttcataacctaactgttgcacttaatttgacaattcaggaaatatatttactcaaataaaaagtcacccaaaatcggcggcttttttcgttaattatttttcttttgcatgtaatagtaaattggcagtcctaacaatgttaaaccaataccaataattgaaagaacaaattgattgataattgttgagacaacgatgaagataccaccgatcacggaaataattggaatgatcggataccatggaaccttaaatggacgttttaattctggctcacgctttctcaaaattattacggcaactgacaacattgtgttgaaagtccacataacgaagactagcatgtcagttaaaacagtaaaattacctagtagaatcatgacaattgcaatagcatcaacaataaacgcgccaactactggaacaccggtatggatattagccttgccaattttattggagaatggcaataaattgtcttgagccaagatataaggcgtgcgcatccctgtcagcatgaatgcgttaaccgcaccgtaaacagaaattaaaattcccacagtgactagttttccaccaaattgaccaaacaatttcattgaagcttgaaacgcggcattattgttattagttaattgatcaataggtaaaacggtcatgaaagtataattgattaaaacataaatcaatgtaattgctgaaagacctaaaataattgcccgtgaaaggtctttttctggatttttgacttcgttagccaaattagtcactacaatccagccttcgaaggcgaataacgcagaaagtaacccttgactaatggcggttggaaatgaatgtccagtgccgactgttaacggaataattggtgcaggtattttggcaggattaaataatccccaaataataattaaagcaattggaatgatttttaggatagtgatgaccgactgcattttgctagaaaatttagttccgattagattaattcctaagagaaaaagcactagcaagatagctattaggttagaatacctcgccttaattccaaataaggagacaaactgaacgccaaaaattgagcttagggcaccaatttgagctggaaaataaacaatcatttgtgcccagccaaaaagaaaaccccacacgcggccgtaagtgtaatcaagatacttaatggcaccattaatttttaagctggcggcaatttctgaaatggtcaaacctgatgcaattgaaatgatcccagctaaaatccatacaaacagggtcattgaagtgctgccagtttgtgcagtaattgttccgatcttgaaaaatacgccagctccgatgacagaaccgactacggtagccaatgcttggccaaatgagatttgtcgtttcatatttatttgttgcccttcgtttacattatttaaattttagcacatcgactggaaatttgaaactgtcaaatcttttgtgtaaatagttctttctcgtaaattgattttttaattatttattcaaaataagattctaaggtatcctgaacctgaccaaagcctttatgaattcggttgaaatagcggtcattgtagctcattgcctggatgccaataaatgcatcaagcgactgttcagttggaaattctgccttaggcttagctttacgcttgatgacgttgttaaaggattcaatcatattggttgaataaattgaagctctgatttgtttgggataattgtagaagaccagcagatcgggctcaatttccttcaaacctttgatgacatggctataagctttattccatctggcatagaatttgtgcaagacagctgcagcttcttttttgcttgtctgttgatgtatctgcttgaattcgttcatgatcttttcgcggtcatccacccggactttagcacagatattgcgcatgacatgaaccaggcagcgttgaaaatgagctttaggataagtcctggccaaggctgttttcatgccaacaacaccatcagaaagaaagagttcaacttgcttcaagcctctggacttcatgttttgaagcatctctgtccagacttcaatgttctcactaggagcaatgcagtagtcaatgacttccttatgtccattaggtttaatgccaatggcaatatatactgcttcacgctcaaacgtttctcggcgcaaaggaaggtatgtcgcatccaaatagacacagaaaaacttgtcgcttagcttgcgcttgtgataagcctcaaccttggggagcatctgcttggaaatatttgatacttgagctggactataatgactgccatacattttctcaatcaagtcagcgatttctctggtagttacgcctttggagtagagcttgataatcgtgctttccaaaacatcagagtgctgcttgtagtcaggcagcgtgtgctgatgaaactgaccgttgcggtctcgaggcacttgcacttcaattggtccaaactgggtatcaaccttgcggaaataagcaccatttctagaattgccagtattccagccatttctggcatagggatcatagcctagaaaggcagtcaactcagcttctagcaagttattaacagcctgttgtagctctttgcgcaataaatcatttattttgtctggattgaatagagcttgagcaaaatctttggtaaaatcattcatgaaggagttcttctttctgtatgtgttttttttgttcaaaccaatcatacgagaaaggaactcctttttctaatgtttaaagaaataaatttaaggaatcattcatccttacacaaactattttacagtctcggaaatttttgtattgataggcttttcggttaaaataattaagggaggaatttagccgatgaaaagatttcagcataagtatactttgccagcgattttgactttattaattctggcgattgcatttcttttgattggctttttcaattttaagcggcaaacaactttaccgccagatgctaattcaagtgcgattgggattgagttaaatcaagatattgactatgttgatttacataaattgcaatctaatggcgtttcctttatatatttgaaagcaacccaaggcagatcatattttgatgaaaactatctgtcttatcgtgaccaaattttaggaacgaacttggcatttggtagtgagatttcctatagcaatgaatcgactccgatgcagcattaccgctactttttttaagcaagtaggacaaaatacgggctcgctgccaattctaattgtaccggcagtgactactcgttcagcgagatatttgcggtcaatggggcagtttgcggctttattgcaagcagctggcaaaagagtcatggtgaaagttgatcataaatatcaacattactttaatccgcaaacgttatttatgtcatcagatagtaaggcaccgaataaattaaagtattcattttggtgctacactactaacggacgcgtaaggaatgtttcaggcttagaaagccaggtaacgatgtacgcgtataacgggaccgttggtcaatataagcaaaagtatgggcaattaacacagtaataatgtatcaagaaaaaatcaaacaagttttaattagagaacacaaggaccagccaactttaattcaaaaagaaagctatgatgccattcgcaatggtgcgagcctggttggattggctaagacaggtacgggtaagacattggcttatgcacttcctagtttggaaaaagcacagccaggtaatgctaacagcgtggtaattattgcgccaacgactgaattagctgtacaaattcgtcatgcaattaatccttacatccacgctttaggattaaaaggcgtcagcttggttggtgctggcaatagaaagagacaagaagacaatctgaagaaaaagcatcctgaagtggtcgtagctacaccaggccgtttttttgacttcttctcaagtggtcgaattaaagtaaaccagatcaagactttgattattgatgaagccgatgatattttagaatttactaaaatggaattgttatcagcattagggcaaaatctgggtccagacagtcaaatcttattatttggagcaacagattctgagattacacgggatgcggagcaagtttttaaccgtcatttcttgttagtagatgtcagaaatgaacaagcttcagcgactaaacattattttttgcaagtagacaatcaacacaagattgaatttttgcagcgaatgactaagttggatcactttaagggaattttgttctttgattcaaataaaacgatgatgcgctttgctggtatttttgggcatactaagactaagttcgaattattagctaatgaatttggtaaagaacgccgtgaaaaagccttaaatgacctagctactggtaagacgaaattgctgctagcaacggatttggctgcgcgtgggttggacattccaggccttacctatgtgattaattttgatattccgagcgagactaatacttacatgcaccgggcaggaagaacaggtcgaatgaacgctgaaggttatgtggttaccttaggcgatgatcacgattttcgtgatttgaagaaattattggcagatcaattacaaatagagcgtgtctactttgcaggctatcatttaacaactgaaaagcctaaactcaagaaggaaaagaagcaggctaaagagcagcccattaagacttcgactaagaaaaataaaactaaaaaacgcaagaaacgtaataagaacaagggatatcatccacattacttgaaaggaaagaaatgattcgtttagttagatggctagaggactatgttttgccgctagctagtagatggggtcagataagatggctagttgctttacgggatgcatttgtctcattaatgccaattacaatggcaggatcattagcagttttaattaagagcttaattgaagcagctcatgatcatttaggctggtatgcctttgcttttgcgatacagccattggtagcaatcagtaatttagtttggcgaggaacattttcattatttgcctttttcttagcattggctttaggctatcaactagcaaaagcttttgaaggaaatagacttgctgcttcaattgtggcattatcttcttttgcactaagcattgccaatatagctaagattaaatttcatggtgataatgttacactgcataatgcatttgacattagtcagttctcaactactggcctctttactgctattttgtttggctcattaggcttttttatttattatgcttgctataaagcaaggattatgttgcatgtgacatcgaacttgccccatgctgaacaagctgcttttgattctttattacctgcaatgattgcaatatttggtgtaggcggaattaattatttgttccaaattcttaccggtaaatattttggaaattggttgcttaccacaattcaaactccattagtaaagtggggacaaggctttggtagggtaattgtcattactttattagtgcagttattttggttttttggaattaatggtataggggttctatcaccaattttggattcaatttggatgactgctcaaaatgataacatcacagcgattagtaatggaaatattccaccatatgtatgggtacgtggctcatttgatgtctttgcctggtttggcggtgctggtggaaccttaatgctaattgtggcgattttaatgttttctaaacgcagtgattatcgcacaattgccaaaatctcactagctccaggaatttttaacattggcgaaccaattctcttgggcctgcctgtagtgctaaatccagtgtatctaattccatttgtattagcgccactagttaatgttgccttttcttattgggttagcattatgggattggttaatccagttcaagtggcagtacctagcatcatgccaccagttattggcccatttctggcttgcaattatgattggcgtgcaattgttttaagcattttaaatatgattgttactttgctaatttggatgccttttgttaaagcagctgataagattgctgataccaaccatccgaaaacattttttaatccacaattctaaaaaaaggttaactattaccactttttttggtaaagttaatcttaggtttgaccccgtagttcatctggatagaacaatggtctcctaaaccgtagaggtgagttcgaatctcaccggggtcatagaaataagcctgcaagtattggtcttgcaggctttttacatgctttggttatccaaaaggtatctttattatcctaagggttgaagcataattgcagtaattaagccccaaactaggaaaacacagattagtgcagtataaagtaaatattttctagttttagcgggtctgtttttgtccataccaaaaacaaggcaaaaagttccaatcaaaataattaaaccagttgtaattaataatagtaatgatgaattcatgcatcgaccaactttcaatttaatacttccattaaaacacagaaagcgggtgcaagatagtctaaaatcaggtatagtaaaatagttaagcggaggaattttttaatgaggaaaattaaggtaatgactgtttttggaacgcgtccagaggcaatcaagatggcaccacttgttttgaaactaaaaaaagatgatcgttttgaagaagtaacggtcgttagcgcacaacaccgcgaaatgttggaccaagtgctagatatttttaaaattaaaccagattatgactttaatattatgcaccaaaatcaaactctagaagaaattacttctaaagtgatgattgatttatctaaggtgatcaaagaagagaaaccagatattgtcttggttcacggcgatacgacgactagttttgcggcttctttagctactttttatcagcaaactacattgggacatgtggaggcaggtctgagaacttggaataagtattcaccatatcctgaagaaatgaatcggcagatgacggatgatttagccgatttatattttgcaccgaccgaattgagtaaggctaatttactgaaggaaaatcaccattctgattttattttcgttactggaaatacggcaatcgatgctttagcacagactgtacaacaagattatcatcatgaggtaatggacgcaattactcctggtaataaggtgattttggttactatgcaccgtcgagaaaatcaaggtgagccaatgcgccgagtatttaaagtaatgcggcaagtaattgattcgcatcctgatgtagaaattatttatccggttcacttatctccacgagtacaaaaagtggctaatgaagtgcttggtggtgatccaaggattcatttgattgagccgcttgatgtggtagatttccataacttagctaaacgttcatactttatcatgactgattcaggtggcgtacaagaagaagctcctagtttaggtaaaccagttttggttttacgtgatacgacggaacgtcctgaaggcgtaaaggccggtaccttgaagttagttggaactgaagtcgacaaggtgcgtgaagaaatgctagctttgttagaaaacaaaaacgaatatgatcggatggcgaatgccaaaaatccatatggagatggacatgcagctgatcgaattatggatgatatttattattactttaatcaagatagtgaaagtaaaccaaaagattttgagtaaaaaaataaagagacagttttaatttttcaatgtcattaagttaagacattgacaaattgaatctaatctctgtagaaccgaatcattatgatttggttctttttttgcataaaataaaggcgaaaagaacctaccttttcgccctctgattaaattattaaaccttcaaaattattgccagaaagctggtgttaattatgaaagcccttcacagaaatattttagatcgtcttgatcaaattatcaatgatactggaaagcatattcatgattttatcgatgatcctcatgccttcactaggaagcggtttttagatgcagctacagtcattaaaactactattaatatgcaaggaaaagatttgaccagtgagttgtttagagcttttggccaaaaagctattaaaaataacgataaagtagtcagtacttccgcttatgtccaacgcaaaggtcagctttcacccgcatgttttaagcatattctaactgtatttaatcagaatttatttaatatccagttatttgatcataaatatcgtatatttgccattgatgggtctgattttaatcaaatctggaatcctaaatcagagaatatcgttggaaatctcaatcataaaggaaagccatattgccaaattcatgttaatgcactctatgacctgttaaataatacttatcaagactgcatctttcagcctaagtcaaagatggatgaacgtaaagccgccgttcaaatgcttaaaaagctaaattgcggaccatatatagttactatggatcgaggttataccggctttaacatgattgaaaattgtaatcgcctgcctaactgttattatgtcatacgtactaaaacgggatatggcgcatttaaggaagtagctgagttgcctaatcaagagtgtgataaggatatagcttgctgggtgactacctctaattattattatgaaacccataaggctacagaaaacgttcatttggttaaccatcattaccgtcaatatataaaatatcggtctaaaaataccaaagatggcagctgggactttggagagttatgtacaataaaatttcgtgcctgtaaatttagaattaatgatcctaaatcaggcaaagaagaatgggaagttgttctaactaatctaaatagagccgattatcccttaaaaaggatcaaagaaatctaccatttgcgctggggcattgaaacttcattcaaaaagttgaaatatgctttaggtagcgtacagtttcattccaagcaggatagatttattgaaatggagatctatgcccacatgattatgtttaacgcagtcagtcaaattgatgctcaagcatatgtaccacaaaaaaaatgcaagtatcaatatgcgatcaatttcaaacagtcatgttttgtcatccaggctatgtatataatttcttcttcaactgaaatctttaaaaagattcttattcaaattagtcattacacaattccgatcagaccaggacgaaaagacaaaagaaatctcaaacccaaatcagctgtatattatttatatcgtgtagcctaatttctaaacaagatttgggtttatttggcatgaaaaaagagcattcaaatgcgataaatcgcaaatgaatgatcttaaaagtccaagtcgataatttgtcaatgtcttaacttaatgacattgtttaatttttgctgtctcttttattttttggttcttgaatgcgcatttttgcacgttcaatcatagtatgttcttgcttttgaaagactgatctagtagttaagtaattgaatacaccgactaaaatttggtcgataattttgactagtaatgcgtttaaatgcagccaggataagccgactaacataattaatgtatcagggattaaactgatgacgcgataagtgaaaaagacgattagtttatgccacgtgctgtgttcatgatcgacattattgataaaaacagccttttggttaaaccagaaagatgccaggttggagacgatgaaggcgatggtgttagaaattaccatcacattatgccaccatgagtgtaagaccatgaagactaaggtattgattaatgcagcgacaaagccgaaaaccatgtaaacccaaagattacggtgtcgcttgattaatttttgacctagacggcgtatttgtgcctgatcaacagctgtgacgtcttttttgttattagccatttaacttatcggccatttcctttgcagcttgatcgattgcagcgactgcatcatcatctggcgcattttcaattgttacgggtttagtaatttcagttgcgccgcaatccttgaatgctttttcatagtcaaaaacattttcacaaaagtgttcaccgtaggtcttatcgccagaacccatcacagcaaaatgtttgcctgttagatctaagtcttttaactccccataaaagtctgccaattcatcagtcattacgccttcaccataggtgtaggtgataaaaatgcaaagatcactatctaagtagtcattggcatcagtgaagccgacatcacttgtttcaacgtcaaagccataatcttgaagatcttcttctaaaatatcagccatgtcttcatcgttaccagtcatgctggcataaacaattcttgctttcatgatttttcatacctttcactgcattatacgacaccttattatacatgaaactattgcaaaaacgtttagttttagcaaactttaaaaatatttcaggtatttctagagttttgttttgattctacaaaaacccgaccttttaaaagtattttggaaaacggtataatagaaatatctgaaactaaataaaaatttataaaggagaaattattttgattacaattaaatcaattcgtgaacttaaaggcatgcaagcttcaggacatcttcttgcaactatgtttgaaggcttacgtgatgtgattaagccaggcatttctacctggaaaattgaagagttttgtcaagacttcgtatcaagtcgtggcggccgcctttcagaacaaggttttgagggttataagtatggtacttgtatttcggttaacgatgaaattgcccaccaaactccaagaaaagatcgcatcttaaaggaaggcgatatcgttaaggttgatgtaacttgcaacttgaacggttatgaatcagattcatgtactacttatccagttggcgaaatttccgaagctgataagaaattaattgaagtaaccaaaaaagcaatgtatctcggaattgaccaagctgttttaggtaacagaattggtgatatcggtgctgctatccaacattatgttgaagatgaaaatcattacggtgatgtacgtgaattaattggccacggtattcaaccatcaattcatgaagatccagaagttcctcactggggcaaggcaggtcatggtcttcgcttgcgtgaaggcatgactattacttgtgaacctatggtagaagctggtggcgactggcacatcgaccaacgtactgttgatgatcctaacgatgattgggtttactacgcaactccagatggttctaatgctgctcaatttgaacacacctttgcaattacaaaagatggtcctaagatcttgaccctgcagcatccttacgatggcttagaaaagtacatccctcactttgatgagatggatgattaggataatggatgaaaaatggtaaaaaccattttggtttaaaaattgggcaatttatttctacattacgaaccaccttatctcaaggagagatatttgctagttcaattattattgcctactacattttgttttctatttttccgattattattatcattggtaacgtgttaccgttgtttcacattgatactgcgcctattgctgaatatttgaacttggtttttccagaccaagtgtcaaaattcattatgccaattataaattctttattgaaaacgacatcaacaggctatatttcttttggtattgtgtttgcagtttggtcattatcaaatatggttaatgcaattcgtcttggagaaaatagactttatggggttcatcaagttgaattaaaattatcaatgcttaattttctttggactagaactattacttttgtttttacaggattgatgattctagtatttacaattgctacattggccttggtttttgggcaacaagtactcaactttttaggaccgatttttcagctaccacttaatgaaattagcaaaatctttagttatcgctatccagtattaatattggttatgatgctagcattatggtatttgaactatgttttgcctaatataaaactcaaaaagagagtaatttggccaggagtttttgtaactgttgtaggctggttagccctatcatttctttttagtttctatttacaccatttcccgattacttgggagaattatggcattgttggtacgtttatcatctttatgctctggttgaatattgcagcagtattatttttatttggcgttggtgttaacgctgctattgtgcgaaaccgtgttggacaagttgaatattctgctggtcgtattgccagttatattcaaaagaaaagacgaaaaactaagtagctgaaaaatgcatattttgttatgatgaacttataaaattgaaatagaaagtgtgcttttatgaaagtaagaaaagccgttatcccatcagctggtttgggtactagatttttacctgcaactaaggctttacctaaggaaatgttacctatcgttgataaaccaacaattcagtttatcgttgaagaggctaaaaagtcaggaatcgaagatattttaattgtaattggcaagaacaaacgcccaattgaagatcactttgattctaatccagaactagaacaagatttggaagaaaagggtaaaaaagaattgcttcgcctaaccgaaggaattactgatttaggcgttaacttgtattacactcgtcaaccgcatccagcaggtttaggagacgccatcttccgtgctcgcagttttgttggggatgaaccatttgtagttatgttgggcgacgacttaatggaagataaggtgccattgaccaagcaattgatcgatcgctataacaagacgcatgcttctacaattgcagttatgcctgtgccacatgaagaagtttctaagtatggtgtcatcgaaccggaaaatgagatcatgccaggactgatcaatgttaagtcattcgttgaaaagcctgatattgataaagcacctagtgattatgccattattggtcgttacttattaacacctgaaatttttgatattttggctaaccaaaaaccaggtcgtggcggtgaaattcaattgactgatgcgattgatacaatgaacaagactcaacgtgtctttgctcatgcctttaaaggcgaacgtcatgatgttggtaacaaagaaggctaccttgaaacttcaattgaatatggtttgaagcacccagaaattaaggaacaattgcgggcatatatcatgcaattgagcaagaagtttgaagctgaaggtaagcaaaataaaaaataagcttaattattagggagactacgctgcggcgtagtctttttatgtttttcttaatatttttttgctattatcatatttgttaaaaaatacacattatggagaatggagagaaaatatatgaaggacatttatattgttgcagctaaaagaacaccttttggcaagtaccgaggattttttaaggatgcttctgcaattgatttgggtgtaatggccttgaaaggaacaatgaaggcgggcaatattaagccagctgatgttcaagcactgtttatggggaatgttttggataccggcttaggtgagaatatggctcgccaagttgccttacattcagggatgagtgaagcttctgcagccgttacaattaatgaagtctgcggctcaagtctgaaagctttacgtctagctcaaggacagatggaactaggcgatttggatctagtagctgtcggcggtagtgagagcatgactaatgcgccttattttgttaaaaaagaaaacaaaaatgatccagcagatcacctagtaagtactatgcttaacgatggtttgatggatgctttttctggcaagcatatgggaattactgccgaaaacgtagcagaaaaatatcatgttagtcgtcaggatatggatgaatttgcattgcagtcgcataaaaaggcagctgtagcagttaaatccggattttttgataatgagatcctggatgtggagattgatggtcaaagtttagatcatgatgaaccaattcgtccggatacaacgcttgaggcattgagtaacttaaagcctgtttttaaggcggatggtgaagtgactgccggaaactcgtctcctttgactgatggtgcaagtatgttagttctggcaactaaggagaaaatgaaagagttaggcttaacgcaaattgccaagttaggtgaatttgcggaagctggctttgatcctgcactgatgggttatactccatattatgcagttaaaaaactgcttaagaagacggggcgtaattttgatgactatgatattatcgaattaaatgaagcctttgcagcccaaagtgtagcggtagctcgcgacttacaaattccaactgataaattgaatattatgggtggcgcaatcgcgttaggtcatcctttaggtgcaacgggtacacgcttagttgctagtgcaattagtggattaaagaagagaaaaggcagacgtgccctggttactttgtgtattggtggcggtcaggcgattgcttatgaaatcgagaatgcagaatgaaattttatcaattagagcctgaagctagacgtaaattattgcaggatgaaggtattgcattagagcaaatcgatgatgcggttctgagacgtctagatgaattgagtgaaaatgttgtagggcagttgcgtttgcctttaggcgtagtacaaaacttaatagtcaatggacaaaaatattgggtgccaatggctgttgaagaaccctcagtagttgctgccgccaatcatggagctagtatctttgctagaaatggtggtgtgacagctagcagcgaccgacaagggatttatggtcaaatcgttttgaaggtcaacaattctttttcattaattgaattagaaaaagaatttccgcacttagtcgaattagctaatcaaaagttttccagcttagtccgtcatggtggtggtactagaaaaataactgctgtgcagaaagaggatttgctttacttaaaagtattggttgatccagctgaggcgatgggcgcgaataaaaccaactcgattttggaatttttagcggctaaattagaaaattatgctggtgttgatgaaaaattatttgcgattttatcaaattatcctagccaattggccacggctaaagtgaagattgatccacaaacgattggtgggatgcaagttgcacaacgtgttgctctattaggaaaaattggaattgacgatccttatcgtgcggtaactaacaataagggaatcatgaatggagccgacgccgtcttaatcgccacaggcaatgattatcgggcaattgaagcagccactgcagttttagccaatcatgatggccaatatcgcagtttatcaaagtggacgatgcagggtagttatttagttggcgaattaacgttgccaatggcgatcggagtagttggtggctcaattaaggcccgtcatgacgtccaacaaagttttgctattttaggacaaaaaatcacgagtaaaactctagctgagattattgttagcgtggctttagccaacaacctagcagctttgctggcaatttctactgttggcattcaagcaggacatatgaaactgcaggcgagaaatgtggttgctgagttaaccgataatgaacatgagcgcaagcagctactagctgcgatgattagtgaaaaaaattattctgaaagtcatgctaaggagcttttagcaaaaataatgcaagtaggtattgatcaaattggactttttacgccagacaagtacgttgatatggtcgatttggcgaacgcaagaaagcaagatcaaaataagtttttagttggcattggtcaaagagagatgagtgttgcggatattacgcaagatgcagtttcaatgggaattaatgcgactttaaagtttattgacaagattgataagaacaaagttggtctattaatttttgggactgaaagtagtattgatcaatcaaagtcagcttctttatttgtaaaaacagccttaaagttgaagccagaagtaagaacttttgaagtaaaggaagcttgctttggtttaacggcatccttaatgatggcacgtgattttgttcgggtacatcctgaacaaaccgcaattgtcatcggtagtgatattgctcgctatggtgttaatactgctggtgaggtaacacaaggagccggtagcgtggcaatgctcatcaaagctgacccaagcattttagccctaaataatggtcattcagcttacagcgaagatattaacgacttctggagaccaaattattctcgcaccgctttagttgacggcaagtattcgactcaagtttacttggatttcttcaagaagacctttactgattataagaagcaaaaaggattaaagactagtgattttgatgcaattacttatcatttaccttttactaagatgggcttaaaagctaataatattgcgattgaggggcaagatcaagcaacaatgatcaagttggagcgtagttttgcggctgctaaacaattatcaagccgagtaggtaatatctacaccgcttcactttatatgagtttacttagtttgctagagaatggtgaattacctgctggctcattaattggcctgttttcatatggttcaggtgcaatggctgagttttatagtggcaagttggttgaaggatatgaaaaacaagttgatcctacagctgatcaagcaatgcttgatcggcggaagaagctgacagttaagcaatatgaagacgtcttcaatacggctttgttagatcctgaggatggcttagaattaactagcgacgatgaagtaggtacttggtattttgctggtactaaggatcatattcgtcaataccgcgtaaaagaataagaaagtgtctgggaaaaaaatagcttccagatgaataaaaacgatcaagatttccttttttaagaatcttgatcgtttttttgttctctttaaaatttttaacaataaaaatcggcccttcagccaccttctttgacaatatttgttcaaattcatcatcataaaggcaattccgatatcggtttcgaccttctctttacctcgcaggtgcgttctgcgcatgccaaatacgttcttcaaatgtccgaaaactggctctacatcatattttctcatgccatagatgtgtctgccttcttcgctttggagaacttcttttgctttttcttttaaatattgccagttaggattatagcgaacttggcgctggcggccgctagctgttttagccaattgttccaattctggcgttagctggaactcgtctgcctcataaaccttaaaatcacggacctgaccagtagaacgatccttgcgctggctgtaatatttgaaattgaatctgacgccatgatgatcaatgtaataatcatctttttcattgtagtaccagttgattagcttagttggatcattcttatactttttggtctgttctttttcatacatagtgtagggaataaagtacttcttgtctggatatttttcctccagcatcgaataattgtattcactgccatagccagcatcggcgacgattttgtcaaacttgtccaacacggtcatttgatccaaaaccggctccaaagttttgaaatctgtcggattaggaaagatggcataatcaactacatattgatcggtcgtgactgcttgaatattgtagccaggctttaattgaccatttttcatgtggtcttccttcatatgcataaaggtggcgtcatgatctgttttggaataactgttgcgtccggcaaagatctcttcggcttcttcatatttttgcattcttggcacataatcttttcttagccggtgcagaatcttttttagtccacgtcgcttggcttttcgaggtgaaccgccaggaatggctttgttttcctgctcaatctctttagtcagcttgttaatttctgcttcagtttcttgagctaattcctttagcccctgactagtttgaactttttctttttccatttctttgactacttctttagtaatcaattcatcataaagttcaactgcctggcctttcagcttttcatgatacttttcaaccgctttgcgccagacaaatgtatagcggttagcatcagcttcaatcttagtaccatcgataaaagcagcaccttcattgattaagccttcatcttctaacaggttagtgaagtagataaagctctttttaatcagttcattggcatggctgcttgatctaaaattattgatagtatgatatgaaatcttttgctggtcagccaagatcatcattggcagattttcttccagcatcaactcaatctttctgccagaaaaaactcttctggagtaagcaaaaagcagtattttgagcatcatggctggatgataggctgggcggcccgttttagcagtcttgcctactaaaacatcttctggaattgaatctacaaaccagctgatgacattagccaaatgattggccggaatggcaaaatctagattaagtgttaaagcagtttgacctgtgatataattcttgtacatgttagtttccaccttttttattttgtgatgatttaataatatcaaggctggagctaaaagtatacaaaaagagcgttgaaacaaaaattcaacgttcttttttcatgatctgagacttagttttttcccagacactttttacattaaaattgcttgtccagtatcttcgcgaatctgtaggccgaaaatggaatattctttttggtcaatgaccattaacaaggggatgccgcgaccacgcatgcggccaactaatttaatcaatttttgtttggtcattgctgtttgcccgggtagcagcagacattttccttcggcaatagtgagttttccccacttaagtagtttgtcatcatgctttagataaaatttagtattcaggttcaggtcatcgattaattgaagcaagtctgttaagcgcatttttcagtataattaagtcataaggattgtaaattttcagcaatttaattataaaatgaaaagtgaaataattgaatttggaagtgttaaaagatgaaaaagaaactattattgtcttccgcattaattgctggagctggcttgtttgcggcaagcgagtactttttcaagatggcgatgacaccgtttaataaaaaagctgactccaaagaattatcaggcaaggatccactttatcgtgataaggtttggtttagagatttttctaagaaaacatggactttaaaaactgatagcggcataactttgttcgcccagtaccttgataaacatgccaaaaaaccgcaattttattacatggctttatgagtgatggagatagtatggctggttttgccaaaatgttttatgattttggttataatgttctcgttccagacgcacgtgcccaagggcgcagcgaaggtaagtatatcggctatggctgggctgaaaaagatgatattttgcgttggatctatcaagtaattgatcaaactggtacaaatgccaaaattgtaattatgggtcaaagcatgggtggtgcaacggcaatgatggtaagcggtatgcttttgccaccacaagtgaaagcttttattgaagattgtggttattcaaccgtgaaaggtgaaattaactatcaagctcaaaatttatttcatatgaaggcttttccacggtttccaatagttgatttggttagtggaattaatagagtgaaaaatggcttttatttaaaagatgcttctgcggttgctcagttaaataaaaatacgcgaccatttttatttattcatggcggcaaggatcactttgtgccaactaagatggtctggcaaaattatgcggcaacagctgctcaaaagcaaatttggcttgcgccacttgcagggcatgctttgtcttatccaatgtatccaaagcaatatcgacaacaagtagaaagatttttgcaaaaatatatgggttagttcttgtaaacggtttcacaactagatataatgaatagtgtggaagaggtagaaataaaagttaacaactataaaaaaatataagtaagtttttatctccagaattgtattattattggaaacttgaaagattctctatacgtagaggtgtcagccataaatagcttaattaaaaattatttgattaattatcattggctgttcgcaaaaactccaatttattaaaagttacattttatgtaaagacccgaacaagtgaatgttaatattggttgcgataatgccattgtttaaatacataccaaacaactaaaaatcgtgactatcaattgatgagctacctcatccacttgaaattgcggctactaagggacaggattgtccagtagccgcttttttatatacaaaaacaacctagcccaagactaggttgttggatttatctatcttttctgagcactaacttagcaattgcctcacagcgtggggtttgtggtaacatgtctacattttggatgacccgaacatcatatgcctcgctaagtaaaactaagtcttgagctaaggttgagggattacatgagatgtagacaaaagtttcaggtttaacccgcaagagggttttgatcaagcttttagctaagcccattcttggtgggtctacgattaaagcattgattgcaacaccactattttgtaattctggcaaaaccttttcaacactgccttgaatataatcagcgtttttgatgtggttaagctcgacattatgttgtgcgtctttgactgcctctggaatggtttcgattccaacaacttgcttaacgcggtcagctgccaaaatacctaaggtaccaacaccactataggcatcaatcaaggtttgatcgggggttaggtctaagtatttcaatgcttctgagtaaagattgatggtttgaactgggttcaattggaagaaggcacgtggtgataaggcgaattttttacctaagatttcttcggtgatttgattcttgcccaaaagcttttcggttttatttccccaaacttgtggattctgccattcggtttcattctgatagacagaaactacatgaccaagtttcataatttctttagcaagagggattaagttcttaatcttgtggccgatcgaaatcaaggttacctggatttccttagttgcttctgattgacggacaactacggtcttaatgccaggtaaatgacgacgatagttggcaacaggaacatgcaatttttcaattaaaaccttgattttacgttccgttttttgtgtatcttcactttgagttggcatctttggtaagtcaatcaagcggtgggaatttggagcaaaaagtccaagcttaagttgaccatgatctttttcaatttgatattgagccttgttgcgataatgccatgggtcaggagcagcgatagtatttttaactttatacttattgtaattacgaggatggtacttgcgtaatgattcaagcatattgttcttcttgaattcaagttgtttgtcgtaagacaagtgcactaattctaagccaccaatctcgggatcaacaccttcagggaagtctacgcgatctggacttttttctttaattctaaccagttcgccttggatgtagtgtggatatgatttaacaatcttggcaactactacttcgtctggcaaggcaccaggaatgaagataatctttttcttgtagtaaccaattccttcaccattaattcctaaacgtttaatagtgatgatgacgtctttttcatgttttggtttattatgggtaaattttctgttcatcgttaattctttctactaaaaactaaattgtgttcaattaattgtactacctggaaaaagttcttagcaagctttagcaaaatttgctagcatggatgtagaaaaatatgcgaggtgaaacaagttgatcataaccaaagtaagtgcacaaaaacggccaggtcgctataatgtttttattgatggaaaatatgctttttctgccggagagaaaacgttggcagaatttgtgctgcttaaaggtaaagaattaaatgatgagcaggttgaaaagattaggcaatttgatgctgatgctaaggctagtgatttagcggctcattttttgagttacgagcctcggaccatctttgaggtgctgcaatatttaaaaaaacacgaaatctctgatgaagcagccaatagtgctgttagtcaattgaatgaattaggctatcttgatgatcgtcaatatgccaagctgtttatcaaaaatgatttgcgtgttggctctgatggccctaaaattttattacgaaagttgacgcaaaaaggcgttgatcctgaaattagtcaggataagttagatgaaattgatgaagaagattggctcgaagtgggccaacgcgtgattaagtcgatgagccatcaagttggcaagatttcacaacgtgaattagagcgtaagatgcgtactaaattattaacgcatggctttgatagcgggattagtaacgttattattgatgcaatggatcttaaagaagatgagaatgcacaaacagaagctttgaagaaacaaggaattaaggcttacaagcgttttagaaatcttccagaaattgaacgcaattttaaaataaaaaaatatttgtttagtcacggtttttcatcaggtgagattgatgcctttttaaacggtgaaataattgatttagacgaattagtagaatattaggagaaaaaatgaagaaaaatattgaatcaagattatttattggtcgtccatttccagctggtttgatgaatgctcaaaagagctttatggaagctaatcagcaaatggaaaatgatgaaacttttcaaaaatttttagctgatcataatttagaaaataagcgttctgtcctagtggtatcaggtgaggacagctttatgtattggtatggcgttttagcagatgtagcaaaagatgaagtgccaacgggtttaatgaagtttgaattaccagctgcagaggtagcggaggaagtagaagagaatcaaactttagtctttttcaacttaccgttgactagtaccgtgccaaattttgccaaaaaagtagttgctagcggaattgaagtacatgaaaatttgggtgacagtgacacgccatatattacttgggatcttgacatggatacaaaaaaactggcccaagtaatgtacttgaaggccagcaagtaattaatgctgctcagggtcgattgacaggttatcgtattcaacataagcgccaagacaagttgaaacaaacatgattaacaaaacaaagccgatggagccgcctacgatttgatcaagtgttaaaagagcacgtattatgtaggtagcagcaaagcaaagaacaaagtctaagataatattagctgctaaaagccagtagcgccgtctgatactgaagaaacgtaaaagctgcttcagtaagccatcgttggtttgaacagctaataaatcaacaggccgttgaatagtagccttgacagcaaacataatgattgcgccaactaatgagccgattaatgtgcgataaagttcagctgaatgtaaaactaatgcattatagccgattccaataatagctaagctacagatatagggaattagcaaaagaaatgtaaaaacgagtaagacatgactttttttcatgacgaacctcctagtcttatgtgctattttaacataattgttattggctctatgctataatagctatatttagataacttttttaagaaagagagtacgaaaatgaatagtgatcctggagcgggaactctgtttggtcgcttaaaaaatagattatccggcgataaaaaagtggggactaaagatcatttagaaaaagaaattgttactttacatgaaagtcataaaattgatgatacagaattttcaatgctagaaggtattttggactttcagggtaagacagcccgtgaagtaatggtacctagaacggatgctttcatggttgatcgagaagtcagttttcaagacaatctagatgaaatccttcgtgagccatattctagaattcccgtttatcaacgtgataaggataagattgtagggattattcatatcagaacggttttacgaaaggctaaacaaaagggttttgataatcttgactataaagatgtcatgactgagccgctgtttgcaccagaaactgccgagctgggcgatttgttgatggaaatgcagcaaacgcaacgacaattagcaattttgacagatgaatatggcggtgtaactggattagctacaattgaagatttggttgaagagattgtgggcgatattgatgatgaggttgatcacactgagattctttttaatcaaatagctacaaataagtacattatttacggtaagatgccattagatgattttaatgagcaatttggtactaatcttcaaatggaagatgttgatacgatagcaggctatgtgatcaatactttaaaagtgattccagctaagggagaaaagttaacagttgatattggtgatgggatgactttgaccactagaaggatgaaggggtcacgcttgttgacggtattattaacgattgatgaatcaaaaaaggaagaagatagcgaggactaatggacaaagagttagcagataaagtaaaaaagagaagaacatttgcaattatttctcaccccgatgcaggtaagacaacgattactgaacaaatgcttttgtttggtggggtaattcgtaaagcaggtacggttaaggcacgtaaaactggcaattttgctactagtgactggatggaaatcgaaaagaagcgtgggatttctgttactagttcggttatgcagtttgaatatcaaggcaaacgtatcaatattttggatacgccaggacaccaggacttctcagaagatacttaccgtacattaatggccgttgactcagctgtcatggtaattgactctgctaaaggtatcgagccacagacaaagaagttgtttaaggttgttaagcaacgtggtattccaattttcacgtttatgaacaagcttgatcgtgatggacgtccaccattagatttaattgcggaattggaagatttgcttggtatcgagggtgtagcaatggactggccaattggttcaggtcaaactttaaagggtctatatgacatcgctaataatcgtgttgagctttaccgcaaaaatgatcaagatcgctttttaccattagatcaagatggtaagttgcctgatagtgagccacttagtcaagatcctcaattccaggatactctggatgaaattgatttgattaaagaagctgggaacaagtttgaccgcgagaagattgctatgggtgatcaaactcctgtcttctttggctcagctttgaccaattttggggttgagacattcttgaacagctttgttgatttggctccagcaccagagagtcacacagttaatggggatgaggagctaagtccagaagatccagaattttcaggctttgtcttcaagattcaggctaatatgaatcctcatcaccgtgaccgaatcgcctttgttagagtcggttctggtgaattcaagaaaggcttggacgtaactttagctagaactgataagccaattcgtttaaataatgcgactgaattcatgtcaagcgagcgagtacaagtttctgatgcggtagctggcgatatagttggcttatacgatactggtaattttcaaattggtgacagtatttatgctggtaagcgcaagattgtttatccaccattaccagaatttacacctgaattatttatgcgagtaactgctaagaacgtgatgaagcaaaaatcattccataaggggatgaaccagctagtccaagaaggtgcaattcagctttaccgcaattatcaaacggatgagtatattcttggtgctgttggtcaattgcagtttgaagtgttccaattcagaatgaagaatgaatataattctgaagttgaaatgaacagtattggtcatcgtgttgcgcgctggattgatccggaacagcttgacccacgcatgtctaatactcgtaacttattagttaaggaccgttatggtaatccattattcttatttgaaaatgaatttgcggaacgtttcttccatgacaaatatccagatgttgaattaacagaaaaactttaaagcaaaaagaaaaaggagaattgaatgaatcaatcctccttttttgatacaacaatatttggattacttgtcaacgtgaatttcgattacatgacgactcttgtctacagtcaaagtgtatgaagaatcataatctttaattaaacgcttgattacgaattcaatctcatcttcgcgaacacgacggtcatggttttcaagtgcaataccgatagaatccttactttcagtataaataactgaagtattaccaagagaataaactttaacatagtttgcatcggtagtgttgagctgactgtgaaccaaatcagagtaattattggttacatcaattaaatgcatggaattcacctgtttctgttagctttacttcttctaatttagtatacctcaaattgagtagcatatttttatttttaagaaaaaagatttcgaatattgcttcgaaatcttttggtataacttggactttgtcttttattaaatcctattcattatttgcttcatcactgattacaattttaccatcaacaacatcggcttttaaattcttagcctgtgcatgatcaagtttgaaatcagccacattatcctcaatctcttcttggatggtacgacgaagaggacgagcacctaaggcaggattaaagccatcttcaactaatttatcttttgcagcagcagttacatcaatgtgtaggccttgatccttaaccatattgttggtattttgcaacattaagtcaacaatcttaagcaagtctggcttagtcaattcattaaattcgattacatcatcaagacggttcaaaaattctggcttaaagaattggctcatattatttctagcagattcattagcttcatcttcgttttctgctgtaaagccaacgctagcgttcttaatgccttgtcctgcattagaagtcataataatgatggtatccttgaatgaaactgttctaccttgtgagtcagttaaacgaccatcgtcaagaatttgcaagaagaggttcaaaacatctgggtgagctttttcaatttcatcaagcaagatcaaactatatgggttgtgtctaacttgttcagttaattgaccagcttcttcgtagcctacgtaacctggagcagaaccaattaatttggaaactgagtattgttccatgtattcagacatatcgaaacgaatcattgcatcttctgagccaaacatttgcttagccagttgcttagctaactcagttttaccgacaccagttggaccaacgaagaggaatgaaccaattggacggcctgacttgttgaaaccgattcggttacgacgaatggcacgagctactttttcaacagccttgtcttggccgataacgtgagcctttaaatcagcagctagattttgcagttggttttcttcttgcttttgaatatcaccaacaggaatgcctgttttttcttctacgatcttgtccatgatcttatcagtaataacaggggacttgtcaggatctaccttttgatctttaaccttttcatatttttcaatttgatcacggtagtaggctgctttttcgtaatcttcgttttttaaggcttcttccttcaattgctctgcggcattaattctttcttgcattttatccttatcaatataaggaatggttaagttcattctagaacctgcttcatcaagaaggtcaatagccttgtctggtaaaaatctatcttgaatataacgtgctgaaagttttgcggcagcttcaatggcttcatcagtgtagtgaacatggtgatagtcttcgtagcgtttttgaataccttttaagatgcgaattgtttcgtcaattgaaggttctttaacttcaactggttgaaaacgtctagctaaagcagagtctttttcaatatcgcggtattctttgatggtagtagcaccaactaattgcaattcgccacgagccaaagctggcttaataatgttaccggcatccatgccaccttcagcattaccggcaccaacgatttcgtgaatttcatcaataaaaagaatgatatcgtcgttttgttgtaattctttaattaattgttccattctttgttcaaattgaccacgaataccggtaccttgaacaagtgaaacaacatttaatgaaataattcgtttgttctgcaattttgctggtactgatccatctacgatttcttgagctaagccttcgacaacggcagtcttaccaacacctgcttcaccgattaaaacagggttgttcttagttcttctatttaaaatttcgataacccgagcaatctctttatcacgaccgattactgggtcaattttgccttttttagcaagggcagttaagtctgttccgtattggtcaagtaggcttctgccgttttgaccaccattaccagcgcctccccccatttgcattctagggtcgttatttctcatttcattattattgtttgcggcattgttgttatttccgtttaatgcgttgaataaatcatcaaagtcgccaaaaaattcattattattcatttttccttgatttccttgttgattttttaattcttgataacagtgttgacataaatctatttcgcggctttggccattaaccttagtgaaaaggtgaatagaagcgggccgctcatgacaattttggcaaagcaaaatatagtaccgcctttcttttcaactgtaccaaaattatattattagcactcttggtagtcaagtgctaagactcaaacacttattttttgtaagaaatacttttgttaccgcaaacaaaatattaatatttttgaaaattgaatataaatagtcatgtggtaataagtcaatgtaaaagttaaattttatttttaattagtttgttttaaaaccaaaatttgcgtgcatgaaactaagccctatttcaagggattttttaacaactattatttactcctccaaaaatgttttagaccaattaatcacctcggtgtttgatagatttgaccatttttgagcagagtgaaaatggtcctggttaattttcttgcacaaagaacgcaagcgcgtttatgcggagaatagaaagcttcatcgtatttcttttgatagtacttccgaaaaacgggatctctttgtctaatcaggttggcagcttcaaccaaataatatcttagataatgatttccgtttttagtcatcggtttgtgttcgctatcaaaattactagattgcttttgacgccaagctagaccagcgtatttagctagctgtgcttcagtgtcaaagcggtcaatactgccgatttcagcgataataccagcggaataaactgacccaattcctggaatagattgtagtattctctcttcaggaagcgtttggacgatatctgtaattgctttatctaagttcttaatcaatttctgattagttttaatttcggcatagtaaacagataatacggcatcaatcgagtctttcatgactttacctaagcgatatgatcctctaacggcttttctgatcgctttagctaaagtctctggatcagagaagcggccacgtcctttggtttgaaggtagtcaattagatcctcgattggcatttcagcgatttcatcgatggttttactatcagtaacaattgacagcatcgttgcgccaaagatagaagttttaatattgtctttgtcaacggtaactagtttgtttacacgataataaagagtttcaatgaagtgctgcttagctctagtgagcgaagatgtgatttcatatctagctctagttaaacgctgtaaagctaagtattcctcttgccgagcaatagtgacatggtatttaccaaagcgtaagtattcagcgatgtaataggcatcagtaggatcattcttattttcttcgtaaacgtcatgaaatcgtttagtgtttttaggattaatgacatcagtttcaagattaattttttgtaaatcttcgtcattggcaaagaaataagcagggtgaaagctatagattgaagtggcttccatgccgataattactttgtcatagctgttctgtttagcaagttgaagaattatctttttgacctcattagcaccaatcaggtcattagaaaaagattggttaagtaaaggtttttgataattttctgagtcagtaatagcgacttgaagatcttttgaactaacgtcaattccgataaaaagtttcattgagaatggcctcctttctagcaaatatttggtcatagatcgatcatcacatgttagtccctaattacagattctaagacaatctcgcaaaatataagtattcataggttcaagctaaaaagctgcgactgaatctgctctgaatcagtaatagccagaatcgatacagcatgtgagtaagtcattagtaaaactgcttgggcggcagactaaaaaagtagtcaaagctacagaaggaaacaacctataccaattgaccaaggtcaatgacaattagagactagcatctgatgatcgaataaacaaactaaaagaataatcattatcactgatttaatttatataatacgatttaatttatataatacgagtagaattaatagtggaaaaattataaaattttaaaagagtggtgatatttttggattatcagaaaattctagatcaattagtctcaggcgagataaaagagtataaagttgagccaaaagatgcgtttgatcttcaaaagactattagaaattatggaaaaagacaatatattaccggtagggcagaaagaggcggcgcgattgtgtataccgctacgaataccgatgaataaataatgtaaactgttacattgcagttgtctaatctgtaaaaacatgataatctaatactcgaatgggtatttattaccagtttaatttttcaatttaaaggagatatttataatggaaaaacgcgattttcatatcattgcagaaacaggtattcatgcacgtccagctactcttttagtacaagctgcttcaaagtttggctcagatgttaacttggaatacaacggtaagtcagtaaacttgaagtcaatcatgggtgttatgtcacttggtgttggtcaaaatgctgatgttactatcactgctgaaggtgatgacgaaaaggacgcattggacgcaattgccgacactatgaaaaaagaaggtttagctgaataatgaccaagactttaaaaggaattgctgcaagtgatggtatcgctattgctccagcatatcttcttgtggagcctgatctttcattctctaaatcttcaattgctgatgttgaagctgaagtagctcgttacaacgatgcaattaagacttcaactgctgaagttgaaaagattcatgatattgctaaagaaagcttgggcgatgaagaagctcaagtttttgaagcacacttaatgattttaaatgacccagaatttactggtgccattgagaatgaaattaaggattcaaagatcaacgcagaagctgctcttgatgagactgctaagaagtttattgctatttttgaagggatgacagataatccttacatgcaagaacgtgctgctgacgtacgtgatgtttcaaagcgtattatggctcaccttcttggtaaggaattaccaaatcctgcttcaatcgatcatgaagtaattgttgtagctcacgacttaactccaagtgacactgctcaacttaacaaaaagtatgttaagggttttgttactgatattggtggtcgtacagctcactcagctattatggctcgttcacttgaattgccagctgttgttggtactgactcaattactaaggatgttaagaacggcgatatgttaattgctgatggtcttgacggggatgcaattattgatccaagtgacgctcaagtagctgattacaagcaaaagagtgaagcattcattaagcaaaaggcagaatgggctaagcttaagaatgaaccatcagttactgcagatggtaagaaatttatcattgctgctaacattggtacacctaatgatatgccaggtgtaaaggataatggtgcggaagccattggtttgtacagaacagagttcttgtacatggactctagtgactttccaactgaagaagctcaatttgatgcctacaaggaagttattgaaggtatgaatggtaagcaaaccattatcagaacctgtgatatcggtggtgacaagcaccttgattactgggatcttccagaagaaatgaacccattcttaggtgttcgtgctatccgtctttctatgcaatacaaggatatctttagaactcaattaagagctttacttcgtgcatctgcatacggtccattaggaattatgttcccaatgatcggtactttagcagaattacgtgaagctaagcaaattttagctgaagaaaaagataagctcgctaaagaaggcgttaagattggtgatgacttgcaagtcggtatgatgattgaagtacctgctgcagccgttttagctgatcaatttgcaaaggaagttgacttcttctcaattggtactaatgacttaattcaatatactatggctgctgaccgtggtaatgataatgtgtcatacttgtaccaaccatataacccatcagtacttcgtttgattaagcacactattgatggtgctcatgaaaacggtatttggtgtggtatgtgtggtgaagctgctggtgataacactatgttcccaatcttactttcaatgggacttgatgaatactcaatgagtgcaacttcaattttgcgtatcagaagcttaatgaagaaattgaacactgctgacattaaagaattagctaacgaagcttgttatgtatcagaaactgctgaagacaacgaaaaattagttaataatttaatgaaaaaattgaacaagtagttttaatttgcaaaaagagactgtgatgtctctttttttatttttaataattttaaacaaaacgaacgaaatcttcacaaataattcacgttttatctttagtattaagtaaatagcagaggtaaacgataaattaagcacttacgaaaaagaagcttatatggtatactagctatgagtaaagaaacgtatacaaatatttgttctgaggagcgtgatttttatggtagatttatatgtctctcctagttgtacttcatgtcgcaaggcaagagcgtggcttgaaaaacataatattccattcaaggaaagaaacattttttctgaaccattgactaaaaaagaattattaaagatcttgcggatgactgaaaatggtactgaggaaatcatttctacctgctcaagagcttttcaacaattgcgaatcaatttagacgatttatcaattgatcagttacttgatttagtagaaaagaatcctagcttgttaagaagaccaatcattatggatgatcgtcgacttcaagttggttacaatgaagatgaaattcgtcgattcttgccacgaaaagttcgtcggttggaattggctgaagcacaaaagattgcagatttataaaatgattgaaaagtgttagttaaggcttttgttgagactaacacttttattttaaacgaaaaatacgctacaatagatatattaattcatggaggtgagatcctgtgcaggtagatcatattgataagaatactatcagagttcgaattgataaagctgaattggctcgtcgtgggatgggaatgcttgatttattaggtaatagacaaaagattcaagacttcttctataaaattcttgatgaggtcgatgaagaccatgaatttgccaatggtgatccagtatcatttcaagtaatgcctaataatgggggattagatttgatgatcaccaaagttaagccggacgatgcacagaatttaaggaaactaatgggtgatagctttcctaaggatgagcaatcatcaacgaattcggatgattcaaaaagtttctttgatttagatgaggagagtacgaattcaaattcggctcctcaaggaccagctactcacaacttttttaaccaagatgataaaaacaatgagccaactgattggagatcgcgcaagactcaggcttactattttgatgatttaggtagtctaattgaattagctgataaccttaaggcaaatgatttagcttctagcttgtattacttgcatggacaatatttcttaaatttggcatttcttgatgaagaatatgaggagcttaaaccagcagatgcgtggacaatagccaacgaatttggttttaaggtcgatagtgataagatgcgtgtagttgaagaaacaggcaaatgcttattgatgcaaaatgctttaggccagattcgacattactttttaaaagcagctaattattaagattctttaaagaaaaagagacgggacaaaatcaatgtcattaagttaagacattgacaaattatcgacttggacttttaagatcattcatttgcgatttatcgcatttgaatgctcttttttcatgccaaataaacccaaatcttgtttagaaattaggctacacgatataaataatatacagctgatttgggtttgagatttcttttgtcttttcgtcctggtctgatcggaattgtgtaatgactaatttgaataagaatctttttaaagatttcagttgaagaagaaattatatacatagcctggatgacaaaacatgactgtttgaaattgatcgcatattgatacttgcattttttttgtggtacatatgcttgagcatcaatttgactgactgcgttaaacataatcatgtgggcatagatctccatttcaataaatctatcctgcttggaatgaaactgtacgctacctaaagcatatttcaactttttgaatgaagtttcaatgccccagcgcaaatggtagatttctttgatcctttttaagggataatcggctctatttagattagttagaacaacttcccattcttctttgcctgatttaggatcattaattctaaatttacaggcacgaaattttattgtacataactctccaaagtcccagctgccatctttggtatttttagaccgatattttatatattgacggtaatgatggttaaccaaatgaacgttttctgtagccttatgggtttcataataataattagaggtagtcacccagcaagctatatccttatcacactcttgattaggcaactcagctacttccttaaatgcgccatatcccgttttagtacgtatgacataataacagttaggcaggcgattacaattttcaatcatgttaaagccggtataacctcgatccatagtaactatatatggtccgcaatttagctttttaagcatttgaacggcggctttacgttcatccatctttgacttaggctgaaagatgcagtcttgataagtattatttaacaggtcatagagtgcattaacatgaatttggcaatatggctttcctttatgattgagatttccaacgatattctctgatttaggattccagatttgattaaaatcagacccatcaatggcaaatatacgatatttatgatcaaataactggatattaaataaattctgattaaatacagttagaatatgcttaaaacatgcgggtgaaagctgacctttgcgttggacataagcggaagtactgactactttatcgttatttttaatagctttttggccaaaagctctaaacaactcactggtcaaatcttttccttgcatattaatagtagttttaatgactgtagctgcatctaaaaaccgcttcctagtgaaggcatgaggatcatcgataaaatcatgaatatgctttccagtatcattgataatttgatcaagacgatctaaaatatttctgtgaagggctttcataattaacaccagctttctggcaataattttgaaggtttaataatttaatcagagggcgaaaaggtaggttcttttcgcctttattttatgcaaaaaaagaaccaaatcataatgattcggttctacagagattagattcaatttgtcaatgtcttaacttaatgacattgggacaaaattccgtctcttttttacgtaataaaacatgggtgagaaaaatgtatgcagccatgttaaataagaaattagtccttgcagttgacgaagcatgtttagttaatgcaaggcaaaagaaattgaatcgtgataattatcactgtccacattgcaataaaaaagtaattttggttatgtcggagcaaaaagcagccttttttaagcatcttgtgaagtacagtaacttaatgggtgaaaaagaggagcatcaccaatcgaaaatgctgttgaagtcagctttgacggcagctggttttccggcagaagttgagattccattagctgaaggacaattgcgtgcagatgtcttagcaactgctaagttagcgtttgaagttcaatgtgcgccgttgagtcaacaagaatttaaccatcggcatcagctttatcaaaaaattggtgtaaaagatatttggattgtgggacagcgacactatttgaaacggcgattgaaacgcacacagttgattttctttcgacaaaataaagcttgggggaattactatttagaaattaatccacagagaaatcgtttttgcttaaaatataatgttttcgaagaaccggtagctaataaattggtttatcaaagtaaatcatttgtccttgatgaattggggataaaagatttttggcgctttaagccattcaaaaaagaatattctttgaacattgcaactcaaagaaaatatttacgccagcaaattatgcaaaaaaaaaagttaggattgaaaataggagagatgctttatgaacgcaaattaactcttgatgatttacctgataaagtttttgctacttggcgtaacccaggtgaaagagatcgggttagtgattttttgcaaaaataaaacgcctttagataaggcgtaaatgatgctccgcaggtaaatagtctgaaaaacacttttgacaatctggaagcattagattaactaaatcctgttgattgattggtccctctagcaatactccattttgctcgttgtcttcgttaaagataacggtggtaggagtagctttaatattccattggttggctagtttttgatcttcttcaatagaagtacgcaggtaatcagtttgtttgattgcctgaatatccgcatccttgatatgtaatttgtttgcgatccgcttaagcagctcaggtgtataagctgaagcatctttgctcaagtttttttgtaattcatacaggtattgacgggcttttttgttgccataggccagcctaatcgcgtggtaattttctaatgcttcataagttgctctagaaaaattactaatatcaggcaacttctggtcatctttgcgtcggcgaatcgcatcatcattgattaaacaaacatttgcaatgggaatatagtgataacaaacgtcgacccctaattcatcaacggttttacgaatctgtttttcagtgtcataacaataaatccctattggattgatgaatagaaaaatctcaaacataatctcgacctctttggtgatttactattagttactttagcaagaaaaaaaataagtgacaaaaaatatgccttattttctatatactatttttggtgagcgcttgcacgagctattttgctttgattagtgttagcagccgtttgttcaaagtcatattcttgttcaagtttagttaatactgtttgaattaaagcaggattagtattttcgatttctaattcaaaatcttgatagttatctggataagacgtagcatctagagttaattcacagttttgtggcccgttcatcaaaattctgcgggttttgctccaggtgaaaagatgtagctttttttggtcattggcaaaatgattatctagatatgcgccaatattaccagtgaatttaaaatgcttttttgctactaattttttagcttgagcgtgagttaattcatcattaatttcaattacttcatggaaattcttttgtacaggattaggatccggtaccttcattgtttgctctgcgtgagtagcatagattcgaatacgcaagctaatttgatgattttttaataaatcatctgctgtatcaaaataataattttcttgggtaaagtcacttttgattggaaaagcggcagtgatctgatcataaacgcttttatttaaaagagtttttgcttcaatttctcgatttttactcatctgtttttcctccgaactgtttaacttaattatatggtaaaatgagtttgtttgcttaagaaaggaatgttttctcatggaattagattgggataacttcttgtggccttataacgaagctgttcgcgagttaaaggttaaatttcgttcccttagacaaggctttttaactaagggagaacattcacctattgaatttgtaattggccgggtaaagacagttgattctatcaaggaaaaaatgaaacggcgagtaattagtcctgatgtcattgagactgatatgcaagatattgcagggattaggattgttactcaatttgtagacgatatttataaggtagtagatttgattcatgctcgagatgatatggaagttgttgaggagcgtgattatattcaaaatgctaagccgagtggatatcggtcataccacatggtgattaactatacggtttacttaccagaaggtccgaaaaaattaattgcggaagttcagattagaactatggcaatgaacttttgggctactgtcgaacatactttaaattacaaatatcaaggtgtctatcctgatgacatttcagctagattaaaatcaacggctgaagccgcttatagactagacgaagaaatgtcgtcaattaaggatgaggtccaagaagctcagaaaatttttaccaaaaataagggcaaagaaaaattatgaaagtaacaatagcgcataataactatgatgaaacattaaagacagttgcgcagcttaagaagctgcttcaggaaaaaggttttatctttgatgctagatatcctgatgtagtgatcactgttggcggtgatggcaccctcatcaatgccttccaccgctatgaaaatcaagtagattctgtgcgctttattgggattcatactggccacttaggtttttatactgattggcgtaactatgatattgaaaaaatggttgatgctttagcagtaaccaagggtgaaccagcgaagtatcctttactagaaataaagatgctcactgaatcaggtgaaactcattaccatttagccgtcaatgaatcagcggttaaaagagtttcacatacattagaggccgatgtgtacattaatgatcaattatttgaaaactttcgaggcgatggtctttgcgtttcaacaccaacaggttcgactgcttatggcaaatcactaggtggtgcagtaattcatccccggctaaaagcgttgcaaatgactgaaattgcctcaattaataatcgagtttttagaactttgtcatcaccaattgtgattgcgcctgatcaatggatttcgattgttcctaatgcagatcattttgtgatgacagttgatggagcaagaattgatgtacgtaatgctaagaagattgaatatcgaatttcgcggcattcgattcagtttgatcaatttggccaccatcatttttggtcacgcgtacaaaatgcgtttattggagataatgaaaaaaatgactagtttatttaaactaattgtgcaagaaagagaccccaaaaagctgggtccttttttgttaaaaaatggtttttcgcatcaagcgttaaacaatgctaaacaccatcatggcatgattttagtaaatcataaaagaagatatactagctttaatttgcgtgctggggatgaagtgatttttatcagtggtgaagaaaagaaaaatgattttttaaagccatcgaataatccagtatcaattgtgttggagaataaaaattatcttgtagttaacaaacctgcaggtgtgttgtcaattccctcacgctatgaagatgatgatgcggtggtcaatcgattgttgggttattttgcccaaaaaggacagaaaaatttgaagccgcatgttattactagattagatcgagatacatctggtttagtattggtggggaaaaatgcaatttcccatgctcgttttagtaaaattggcaaggagaaatttgtcaaaaaatatcatgcaattgtacatggcaattttgctccgaatgagttaactggtttaattgatcaaccgattggcaaaaagggtagtggagttaaacgtgcagtagtggcagatggaaaggacgctcaaaccgcgtatcgagtcctagatcaggttacaggtgctagcttggtagagttacgcttgcttaccggtagaacccatcagatccgtgttcacatggcttatctgggacaccccttatatggtgatcctttatatggaattcaagatgggttttcacgccaagccttaaattgcttttatttaaattttccggatccatttagccagcaaaaatgtaaaacaattgagttgaatgatccaaaagatatgcaagaactgtggcagaaactaattaataaagaattctaaagttattagctaaaacttctaaaaaactcgcatctagtaaccgctttctttataattaaagtgtaatgttaaaaactatacttatacagaaaagaggatatctttatgtactattccaatggtaattatgaggcttttgcggatgccaaaaagcccgcaggcgtagataaaaaatctgcttatattattggtagtggtttagccggtctttctgcagctgtctttttagttcgtgatgcacaaatgaagggtgaaaatattcatattttagaagagctacccgtagctggtggttcacttgatggtgctaagcgtcctaatgcaggtttcgtggttcggggcggccgcgaaatggagaaccactttgaatgtttgtgggatatgtacagatcgattccaagtttggaaatccctggcgcatcatacttagatgaatattattggcttgataaagaagatcctaactcatccaattgccgtctaatttataatcgcggtgatcgcttaccaagtgatggtcaatatggtctaggtaagtgcactaatgaaatcgtgaagttaatcatgacaccggaaaaggaactcaaaggtgaaacaattgaagaattcttcagtgatgacttctttaagactaatttctggacatactgggcaacaatgtttgcctttgaaaaatggcactcagcagccgaaatgcggcgttatgcaatgcgctttattcaccatattgatggtttgcctgactttaccgcattgaagtttaacaagtataaccaatatgagtccatggttaagccacttttggcatatttaaaagatcacggtgttcaatttgaatatgattgtcacgttgataacgtggttgttgatcatgagggcaagcaaaaggttgccaagaagatcgtgatgaccaagaatggtgagcaaagtgatattgatttaaccccagatgatattgtctttgtgactaacggttcaatcactgaaagttctacttatggtgatcaaaataccccagcaccaattactcacgacaagggctcttcatggaaattatgggaaaatttggctaaacaagatcctgactttggtcatccagatgtcttctgtgaaaacttgccagagcgtagttggttcgtatcagctacagctaccttggaaaataagaaaatagctccatactttgaacgcttgactaagcgcagcctttacgatggtaaagttaatactggtggaattatcactgttgttgactctaattgggaacttagctttactattcaccgtcaacctcactttaagagccagaatccagatcaaatcgttgtttggatttatgctttgtattctgatactgagggtaattacatcaagaagagagtcgttgactgtactggtaaagaaattgccgaggaaatgctctatcacttaggcgtgccagagagtcaaatcagcgaattggctagtgaagaaaatatgaataccgtaccagtttacatgccatatatcactagttactttatgcctcgtcatgatggggaccgtccagatgttgttccagaaggatcagttaatattgcctttattggcaattttgccgaatcaccaactagagacactgtctttaccaccgaatattctgtcagaactgccatggaagctgtttatacattgcttaacgttgaccgtggtgtacctgaagtatttgactcaatttatgatattcgtcaattgcttcgtgcgatgtactacatgtctgacaagaagaaattagttgatcaagagatgccattacctgagaagttagctctcaaaacagggatgaagaaaatcaagagaacttgggtcgaagaactgttagaagaagctaacttagtttaaatatgctaggcataataaaaaagcttgagtaaattcaagctttttttgtacgctttttgattgctctcagactaagcaaaatagctactgcaattaaagcaatgacaacgaatgagattacaactttaatcaatcgtgttccgtctaagtgcaagattgaatcgccaccataagcatataagtaagcgaaggggatgacaccgataatgattggtattagctgttttttacgttgctccttattaatcataatgttgacatagctaactgtcgcactcggaataaatggaatcatatatccaataattaatccaagcattggtgattttaatccagtcaataacttataaactttactgttagacatctttttcatgtcatagagtttttgcaaaagttccattaaaattatttggcctaaaatgtcactgatccaattaacaataaatccccaggcagggccataaaggattccgttgagaacacaaaagattccgttggataagccaggaattgctacacagatcgcattaagtaaaaataaaaaggctaagtcttcaataccatggctacggaccatgttaacgagtacttcttcattatggtgatcaaaatgaagtaataaattcaattcaggacggtaatttaaatagagtttatacagaagtagtaaccctaatatcccgccaagaatgaaaagtaatattcgaattatttttcttttcactttgtcaccttctcgtattatataaattgtaattagtcatattgtgataattaatcaaattagtatttgctttttgatcttcgcatgttagcctctaattgtcattggctttggtcaactggtctaggttatcacctcctgcagttttgtctgctttataagtctgccacccaggcagttcctttatgctctaactcacatgctgtattgattgcttctttttgctagtccttgagcaattgggattaggtgcagctttcaaagaagcaaccagtgaatacttatactggcgagattgaacttaagaactgtaattaggggttaacatgtgaagatcaaaatctatgatcagaaatttgaaagaaaggaggccatttccaatgaaattatttgtcggtattgatgttagttctaaagatttacaggtcgttgcacttgattcagaagatcaaaacaaacgcttaattaacgatagctttgtcaatgatctttatggtgctagtgaactgaaaaaacaaattttagatctagctcaaaataaacactatgatcaaatcattattggcatggaagctacatctatttacagttttcatcctgcttactttttccaaaatgacgaagatttacaaaagctcaatgtagagactgatgtaattaaccccaaagaaaccagcaggtttcataaagtctttgaagaaagtaaaactgatcctctcgatgcttattacattgctttgtatctaagctttggacattatcgagtaagcattgccagacaagacaactatcttgctttagagcgtttaacgcgtaccagatatgaattagttcaagaactgactcgtaccaaacagcacttcattgaagctttatattatcgggttaataaactaatcactgtcgataaagataagattaatactcctcttttcggtgctacaatgatgtctattgtaaccgatagtaaaactctggatgagatcgcggatatgcctaccgaagacttaatttcttacttacaggttaaaggcagaggacgcttttccgatccagataccttggctaaagcaattaagaaagctgttagaggttcatatcgcttaggcaaagtaatgactgattcaattgatgcagtgctttctgttcattacaacatgatccaaagctttaatgaatctattaaagatctagaaaaagcaattgatcgtatcgttgatgcattaccagaaagcaaaattctggaatcaattcccggtattggcaaaacctatacagctggtattatcgctgagatcggaagtatcgatcgctttgataaagaagaacagctggctaagtatgccggcctaacctggaatcaatatcaatcgggagatcacagcaacgaacatactccaatggccaggactggaaacagatatctaagatattacttgattgaagctgccaatctagcaagattacatgatcctgttttcaaaaaatattaccaaaagaagtatgatgaagctgtctactcgccgcataaacgtgcttgcacattaactgcaagaaaattagtacgagttatctttaaattgctcaaagatgacaaactgtacaggacaccgaggtcttaatttcaaaaattggtctaaatttaaaagtaaacaaaagtttaacatttaaaaaatcaacctttaccaaggcttagtttcatatactcaaatttatgatcaaaaagaacaaatatcatcgcctttcatttgacttattaccacatgacttatattttgtttcatttatttctattttactttaagttgtaggaataaaaaagccatgacgttctattgcgccatgactttggtactaatgctaattactatttggtgaaaagaacgcgagtgccttctggtacggaaatttctttttgaataggagttaggctaccagtaccagcgtttcttgtgtaaagagtagcattatctgtattttgattagcgacaacgacgtagcgctgatctttatcccaattaaaatcacgagggaagtcaccaaaagtggatacacgttgaaccaggctcaaagtatgatcgtcgttaactttgaagacagcaattgaattatgtcccctgttggaagtgtaaacatatttgccatcttgactaatatataaggcagcagctccgttatggtcagtaaaatcagcgggaattgtcttataagtagcaatattttcaaagtcccaagtgtcttcgttaaatttaacgacattgatttgactagaaagttcaccgacaacgtagaagtaattgccatctttactgaagacgatatgacgtgtaccaaagccagtttcgcacttatattgagcaatgtgttttaattgatcattttctaatctataaaaatcaacggtatcattgcctagatcacaactaaccaagttaccagctggggtttcatcaaagaagtgagggtgaggaccgtcaacttgttcaggacgcggacccaacgtttcagctttgtgagttacagtatcaactagatcgagcttgccactgtcgttgtagcggaaaacggacaagacagcagtatgatagttagcagtgtaaatcaactttttggtgcggttaattcctacataagctggcgaagagcctggagttaaatagtggtcaacttcgtttgcgccttgatcacttaattgaaagacgctgattccacctttatcgccagcgttattaacagtaaaaattaaattaccatcttttcggaaataagttggaccaccaacgctaataatattctcagctttgcctaaacgggcatcatttgctgcactggtaataggtaattcataaatccctttggaagtttttttggtgtaacctccgattaaaaccttcatatgtgtgggcctccatctctaaataaaaataagtctaaaataaagtatagcatgaaagcggattagacgcttaaaaacacgatttcctgttgagcaaaaaataatcgccgattttgggctgcttaagtttttaagcagcttttcttatgctaaaattatttttaaggagagattatattatgaaatggattgcaaatattaaaaaaattggtaaaaaggccgtcgataataaagatggcatggtaattttatttggcgagggtgctaataaggatttggaagacgtttctgtcattcaaaaattcagtactgagacgccagttagtggttttgtttttaaaaaaggcgatacaatcactgttgatggtcaaacctatgttgcaaactatgttggtccgatggtagagagcaacatgaaggcattgggacacgcaaccttgttctttaaccgtcccgtttctaagacgccacttgctaatgcgatctactttgatccggatattgatcaaccattacctaattttaaggttgatgatgatattgtttatgaacacatttaaaaattaggatgaatagatggaaaataaccaacataggggtggaactgtttttaaaaaatggttcttagataatcgttttagtattgttttattaaacgtcctgctattctttttaattatttgggtctttaataaagtatcttttgtattgaatcctgcctggatcttctttagtgcaattttaccgccattattattagcggtaattcagtactatatcatgaatccggttgttgattggtgtgaaagaaaatttaagattccgcgagtggtgacaattatagttttattcttactagtagttgtcgcattaatttggattattaatatcttggttccaattgcacagaatcagattaattcattgataaagaactggcctcatatttggaatgatgcggttaatgcaacacaaaatgcgttgcaagatccgcgtttacattcatttaaaggcagtatcaaaggcatgattgataatacgcagaagaccttatttaagtctggacaaagtaccatcaatgcaactatcggcaatatttcatctgccgtcagcattattacaatggtggctatgactttgttaactgcaccgtttattttattcttcatgttaaaagatggtcatcaactgcggccatatattaccaagtttgcacctgaaaaatggcaacctagttttagcaaattattatatgatattaactatgctgttgcttcatatgtccgtggtcaaattactgttgccttttgggtaggtgtgatgttctcattgggttacattctaattggtttaccatatggcgtggctttggcaattttagctgggtttatgaacttaatcccatactttggtacaccattagcaatgattcctgtaattgtaatttcaattatgacttcaggttcaatgttaattaaggtcttaattgtttttgctattgaacaaacaattgaatcaagaattcttagcccatgggtaatggggaataaaatggaaatgcacccaattacaacaattttactcttgattggtgctagtgccgtctggggcttatggggtgtagttttcggtattccaatttatgcgatcttgaagattattgtgtctcgcgtgtacaattattatcgaagagagtctaaactctttgaagagaatgctgtttcttcgaccacgggggatgcagatcatgacgaaagcgaataaatactagatagttttaaagcgtggcttaaaagctacgctttttttgataaggagttttttgaatgactaatcatgtagttttgtatgaaccattgatgccagctaatactggcaatattgctcgtacttgtgcggggactaacactgtccttgatttgattgaaccacttggttttcaaatcgataataaaaaaatgaagcgagcaggtcttgattattgggataaggtcgatgtacgcagacatgatgacttgaatgcctttttgaagactttagggcctaatgatgagatgtatttaatttctaaattctcatcaaaaaattatgcacaagtcgattatactgatcctaacaagaattattactttgtttttggtaaagaaacaactggtttgccagaaacttttatgcgtgaatactatgaccgtaatttacgtatcccaatgtctgataacattcggtgttataacttgtctaattctgtagcaatggttttgctagaagctttacgccagcaaggttttcctaatatggaaacaacccatcattatgaaaatgacaagttaaaagatgactatgatcgtcctgaaagatatgaacgtaatctaggggagaataaataatggattttgaaaaacagacagatattatcgtacaggcatttcattatgatttagttgatgaagataccaaaccaattagtgacgttagaccaggaattagaaaattagatgttagcggtgacgatgagcattcagaagaaaatggtagttactatgatgttgctattcaatatgatgtaattcctgcaccagctatgtttgaagcaagcggcttgattcatcaaatcgtgcaattaaaagattaccatggtgatggctctgacattagtaattcagattggcagttactaactcgaccattagttgagcaacttgagaccttgatctatgaaacaacccaattaactttgggtcagccggttaacttgaacttcaaggctgaattcgataattaatcaggtgagtacatgcctgcaaaaaagaaacaaagaaaggccaaaaagagctacaataagcgaaaagcaaacaaaaagcaaaatcttaattggagtatttgtggtttagtcttgattttaatagcggggctggcttttgtccgtttcggtattttgggtaagcaaatcgcaaatttgattcgaatgttcttcggggattcttatttgtttgcggcaggtttactgggactttttggcctagtaaatttaatctataatcaaccgattcacttaacaattaagcgtagcttggggttagcaatcgcttttttgggaattctgttaattcaatgtaacttgtattttgaacatgaattagttaacagtaatttcctgaattctttttggcatgcaatggccgcggagtttggtcgtgctggagtcactgagagcattggtggtggattaattggttcattagcttatcaacttttttatccactactagggcaaatcggtgtccgtgtttttgctattttattgctgccaattggaattttgatgttttttgatgttaaatttagaacaattatcgaaaaattccagacagttagtcaattattcatcaaaaagaataaagaagctggggtaaaggtcaaagataaatataatgacgtttgggaaaagcggcgtcagaaaaaagaggaacaagacgaagatttagttgatgacgataaaccgatttttcctaatgtagcagactttgaccctgccgatccaactgatgacgatgtaacgccgacggctgaagacgtagaagttgagccagagaccacacctgatccagaaccgcaaattcaaattgcaccacaacatgatgacggggtaaaggaactacctaagtcacattcttttgcggaagatgatcaaaagttaaagcaggaattagccgatgtcgatcatggtgaactaaaaactgatgcgccagtcaataaagcttataagatgccacctttaagcttacttgatccaattaaatcgactgatcagagtactgaccgtgatttaattaagaaaaatacccaagttttgcaatcaacgtttaagagttttggcgttaaggtgattattaaaaaagctattttaggaccaactattacgcgttatgaagtccagccagctgttggcgttaaggtaagtcgaattgtaaacttagcggatgatttggctttggcgcttgcggctaaagatattcgaattgaagcaccaattcctggtaagccctttatcggaattgaggtacctaaccgagcaacgtctgttgtttcattcaaagacgtgatggaacatcaagataataaagccaaaagcgatccgatggatgtaccattgggtaaagatgtaactggaagcattatttctgccaacttagctaagatgccacacctattgattgctggttcaactggttctggtaagtccgtagcgattaatacaattttagccagtattttaatgaaggcgcggcctgaagaagttaaattagttttaattgaccccaagatggtcgaactttcagtttataatggtgtgccgcatttattgatccctgtggtgaccgatgctaagctagccgcaaatgcactgcgcaaagttgttaaagaaatggagcgcagatataagctatttgcggctggtggcgtgcgaaacatgagtgaatataatcaaaaagttgctgaaaacaatcgtgataaaactaaaccagtgatgaagccgttaccttatattctagttgtagttgacgaacttagtgatttgatgatggttggtggtcacgatgttgaaggcgcgattgttcgtttaggacaaatggcacgtgctgccggaattcatatgattttggcaactcagcgtccaagtgttgatgttattactggtttgattaaagcaaatgtaccatcgagaatttcctttgctgtatcaagtggagtggattcaaggactattttggatcaaacaggtgcagaaaaattacttggtcgtggtgatatgctttatatgccaattggggcatctaaacctgaacgtgttcaaggtgcttatattgctagtgatgaagttgaacgcgtaattgaatgggttaagaagcaacaagaggttagttatgatgagacaatgattcctaaaaaaggtgaaaattcatcaaatgctgatagtaaagatgatgagccagcagatgaattctatgagcaagctgttgatttagtacgacgtcaacagacggccagcgtgtcaatgttgcagcgtaggtttagaattggttataatcgtgctgctagaattgttgatgaaatggaagctaaagggattgttggtccatctgaaggctctaagccacgacaagttttagtgccaccaataaagaatgaaggtaattcaaacaatgctcacaactaatattgcaattagaaaaaataaaaagtttacaacagccgctattggctgttttttgcgtttgccgctgactaaacataatttagcttatgctagtttgctagcgcgaatacagatgaatagcagcttaagttatccgtcacttgctttacaacaaaaaagattggcagaattatatgatttacagctggagattatgccacaagtttttggtaaagaaatacttttgacttattatgccaattttgttgagccgattgagattttggatccacattatacgtatgaagaaattcttaatgtgattgcacaaatagttaatcaacctaattttgcggaacctttggtggaatatgctaaacgtcaattagcagaagaatatcaagaactgattgaacaaccatctaattatgcgttggagcagttttttaaattgtggtatcaggatcaacctgattatgcggagacatttattggctcactagatgaaatcaaagctgcgactagcacgactatgatgcattattggcgtaatttagctaatgtaccaatgcaaattttaggaatgaccagggataataatctggtttctaaattagctcaggctatgtttcaacaaactggtttaactaaatcatttcaaacagctagtctaactattccagctaaaagaaagttgattgaaaaagaggatgatcaaggaaatgtgcaagctcaattgttaatgggctttggtttagaacaaagtattgattatcgcggtcaagtaatgggaatattattatcgcaatatttggcaggtgatcaatcatctaaattatttacgcaaattcgggagcaattgggagcagcttataatgttgaagcaagctgctttgccaataattctttgtttttagtcagtgcaggacttgatcctagtaagattgcagcggctcgaaaaattattttatccgaaatgggtaaactagttcagggcgaagtagaagatgatttatttaaaaaggctaaaaaggcaattttgcgtaatatgaagattggtctagacggtcaaaactggcagatgggtcaaatgttgcgtgatgaattgttctcgggatatttagactttgatcgtgaaaatgcaattaggagagctacacctaagcagttagtagctttcgcacaaaatttattctttaatgaaagttatgttttaaaatgatgacaccaaaaattatcaaaaaagaatatcagtcaggctttaaagccgaaattattttaaagccacatttttatcaacgatttttcggtataattgttgactttggtagtagtgatccacaaaaggttgccggttcggctcatttcttagagcataagctatttgccaaaaaagatggtgatttgtcaacgcaatttgaagatattggtgctgacgttaatgcattcacgtcttttaatgaaacaatgttttattgtagtggaattgagcatacgcctaaaatgatcgatctcttgtttgaattggtagggcagccgtattttactaaggaaaatatcgcgcaagaggctccgattattgaacaagaattggccatgtatcaggatgacccaacttggagcgtaaataatgcgattatgcatgatatgtttggtgattctaatctagggatcgaagttgtaggtacgaaagaatcaattaatcaagttacagtgaaaaacttgacccaagtttatgaggctaagtatgtgccagaaaagatgcaatttgttgcttgcggtgatttttctgataatcaagtgcaaacgattttgcggcaagtaggaaagctgcagcaaaaatatttgcacgggaaaggtaaaagcacagctgaaaaacaagttagttttcgcatgttacatgatcaagtcttgccagccagaggtaattctaattcctttggtttaggaattcgctttaaaaactttaagaaagtattattaagctttgatttgactcaaattctgttagaaataatgttagaatcaaaactaagtgcaatgggaccatggtttgaagaaatgagaaaaaagcagttgttaatggattcgctgcagatttctgttaattacaccaggcagggcgattttgctactatttttggtgtaagtcctcaagctcaagaagtaattgcagaaataaagagggtattgacggaaccaattaagaaaaattcagcggaataccgttttattagacaaaacttcattttgcaaaagaaagaatggttagcacgcactgctaggacaagtaatgatctgtcttatttggcaattgaattaattgaagaaaatttagatcatgaaaatttaacacaaaatatagctaaattgcaggcgatgaattttgatcagttttatgactactgccaaaagattatgaaagacagtgaactttgttctgcttacttagaaaacaagtaaggggttgataaagttgaagcgagcaattgtctttggtgcaactggcggtattggtcaagatatttgtcgagatttggcagatgccggttggtcattatacttgcattatcattctaattctcaaaaagctgaaaatttagttcaagagctgtttgctaagcatcctgaccaggattttatgtcgctacagttggattttgcgacaggggatgcacagttaacagattttgttaaaaacttgttgccagttaatgcagtagtttttgctcaaggaattactaagtatggttttttaggtgatgaaaaattagcaaatatcactgatctgattaatattaatcttactgtgccaattaagttaactaaattgttagagccacaactgatgaaacgagattttagtcgtatagtttatttaggctcagtctatggtggtgcaggtagtgcattagaaagcgtctatagtgcaactaaaggtggtataaccaggttcgctcaggcttatgcgcgtgaagttgcttccaataacttaacggttaatgtaattgcgcctggtgcggttaaaaccaaaatgaatgcattcttttctgaggatacgattcaagaggtaaaagatgaaatcccagttggtcgttgggccaatggcagtgatatttcatactgggttagaacactgctagatcgacgtagtagttatttaacaggacagacaatttatgttacaggtggatggcttttataactaagacgttgtaatgagaattttatggtatactcaacatgataaattaaaatttgaagaggtaaatatggcagatatcggagataaattaaagagcgccagagaggctaagggactttcaattgcagatattgaaaaagctactaaaattcagagcagatatcttgaagcgattgagaagaatgaatttgataaacttccaggcgatttttatgttagagcatttattcgtcaatatgcacaagttgttggcttggatggtaaggagttattaagtgattaccacgatgatgtaccagaagctaagccagatgagtacgtagaaaactcgattgataataagagtgaagaagtacgagaaaccaccgacaataagaaaaatttgtggaagaattacttgccacgaattgcgatcggacttggtgtaattatcgtaattcttgtagtgtacgttttgtatgctcgtctttcttcaggtggtcaaaagaaccaagctgataataatgatgtaactgtttcatcacaaaagtcatcatcgtcatcttctaagaaagctaaaaaagtagtagtcaataaagttaaggttactaaggttagtgacaatgagtaccgagttactggcttgaataaaaaccgtcgcctagttgtgcgtgctggtgaaaaccaaaatatttcagcgggtgtacaagtcaatggtaatgctaatagctggcaatcaactttacttgctaatcaaaagcacactatgactttgccaagcaatgcagagagagtagtgattactttaggcaacgataatggtacttcaatcactattgcaggtaagaaaatcccatatacagcaaacaatgcgtacaggacaattactttgttgattggtaaggctaagggaactactagtcaaaataatagtagttctaataatacgggctctactaataacaatacaaccaatagtagttctacccaaagccgtacaactactcaaagcagtgctactcgtcaaagcagtcgtcaacaatcatctactactactcaaagtagccaacaaacccaacaaagtagtcaaactcaacaatcatctactactcaatcatcagcagacactaacaatggcaatgatggtggaaataataacaacaattaaaatctaggagtgttagaatgaatttacctaataaacttactgtttttagaatctttttgattccagtatttatgttaatcatcatttttggtgggaatgctagtgttcaagcagcaggctcaactgttgtttggagtcgtgttattgctgctatcgtttttgctgttgcttcggctactgattggtttgacggtcacattgcgcgttcacgtaatatggtaaccaattttggtaagtttgctgatccattagctgataagatgttaactatgactgctttcattttcttagttgaattgaaacttgctccagcatgggtagtagctatcatcgtttgtcgtgaattggctgttactggtttgcgtttgatcttagcagaaaatgaaggacaagttttagcagcaaagatgcctggtaaaattaagactacttgccaaatgttatcaatcattttcttattgattggtgacttcttccacattggtactatcttactttaccttgcgttgatctttactatttactcaggttacgattacttccaccaatcatggggcgtattcaagggctcaatgtaaaatagtattaagtcaagaatgattaaaaagaagcatttgcttctttttttattttgtaaaaaaataatggcgatttttagcgtaataaataatagagggtaaaaaatcctttgaacgttcgtttgcatttctcttgcaaattggacggcggtcaaagtataattattaggtacgaaaaataggaggacattaatggccaaagacgaaaaacaggctgctttagatgcagcgcttaaaaaaatcgaaaagaatttcggtaagggtgctgtaatgcggatgggcgaaaaagctgatacgcaaatttcaacagtgccaacaggttcattagctttagatgctgctatcggtgtaggtggatatcctcgtggtcgtattattgaagtttatggcccagaatcatctggtaagactacggtagcccttcatgctgtagctgaggtgcaaaagcgtggtggtactgcagcatatattgatgccgaaaatgcaatggatcctgcttacgctgaagctttaggtgtagatattgattcactaattttgtcacaacctaatactggtgaagaaggtttgcaaatcgctgatactttgatttccagtggggcaattgacattgtagtagtcgactctgttgctgccttagtaccacgagcagaaattgaaggcgagatgggagatgcccatgttggtttacaagcgagattaatgagtcaagctttgcgtaagttatcaggtaatatttctaaaaccaaaactattgccatctttattaaccagattcgtgaaaaagttggggtaatgtttggtaatcctgaaactaccccaggtggtcgtgctcttaagttttactcaactattagattggaagtaagaagagctgaacagattaagcaatcaggagatgttcttggtaacagagttaaaattaaagttgttaagaacaaggttgctccaccatttaaggtggcagaagtagacattatgtacggtaagggaatttcacaaagtggtgaattactggacatggctgctgataaggacattatcgataaagcaggttcttggtactcttacaagagtgatcgaattggtcagggacgtgagaatgctaagaagtatctagaagagcatccagatatttatcaagatatccaaaagcaagtgcgtcaagcttacgggattgatgaaaagtcaattgctgatcgtgaagatccagaaaagatcaaggagaagcgcgaagaagccaagacagaaaaagaagctgctacagataaaaagtctgaacaagctaaataattatgtcaaaaaccctggatttattttccaaggttttttgatttaattgacatgaacagataggttctttatcataaaagttgtgtgaataattctaaaaaaggcgatagtaatcatgaataatatgttaacaattatgattcccgtcgcaactgccattgtttcattcttggtgggttcagtggttggttatgcaattcgcaagcattcttgggaacaaaaagctcaaaatgcccagaatgatgctgaccacattttagctgatgctaaggcacaggttgctgcagcacaagctgaagttaatgcacaaaagcaagcagcagcggctgttaagcaaagtgcagaaaatactaaaaaagaaaaaattcttgaagctcaagaacaaattcgtgattttaggcaaaagaccgaggatgagttaaattccaagaaagataatttagctcgggagaaaaatcgtttacaacaacgtgaagataccttagatcataagaattctttattagatgaacgtgaaagtggactcacgcaaaaggaagaccaattaaagcagcagtatgctagcttaaaggcaaaattaactgaggctgaagaattagtagaaactagacggcaaaagctttatgacgtagctaagttggatgaggaagaagccaagaagattgtgcttagtcaattatctgatgaactagtcaaagaacgagccgagatgatcagaaatagtaacgaagaagtaaaagctaaagctgatcattatgctaatcaggtcattgtggatgctattcaaagtagcgcggcagatacagttgccgaaacaactgtatctgttgttgatctaccaaatgaagagatgaagggacggattattggtcgtgaaggacgcaatatccgttcatttgaagctttgactggaatagatctaattattgatgatacgccaaaggttgttaccttgagtggttttgatccaattagacgtgaaattgccaaaagagcgatggaacgcttaatcaaggatggccgcattcacccagctagaattgaagaaatggtcgataaggccagaaaagaagttaacgatgacatctatgaagcaggtgaaagtgctttgatggagctgggaattcaccggatgaatcctgaattagttaagacgctaggtcgtcttaaatatcgtacttcttatggacaaaatgttttgtcacattcaattgaagttggtaagctagcaggcacgatggctgcagaattaggcttggatgaaaaattagcagttcgcgcggggttattacacgatattggtaaagccatcgatcatgatattgaaggttcccatgtagaaattggggttgaactaactcgtaaatatcatgaaccagatgttgtagtaaatgcgattgctgcacaccacggcgatgtgcctaagttgtcgtttattgctgaacttgttgttgcagcagatacgatttctagtgctcgtcctggtgcaagaagcgagagtttggaaaattatattagacgtttgaccgaattggaaaagattgctaagagctaccaaggcgttaagcaggcttatgcaattcaagcgggacgtgaagttcgtgtgatggttgaacctgacgaaatttcagatgatcggacagttattttggcacgtgatattcgtaatcaggttgaaaaagaacttgattatccaggtaatattaagattaccgttatccgtgaaaaaagagttgtggcgatcgctaaataaattaaaaagtttggaagataatttttccaaacttttttgctatttgtgcaaaatactgactacttgtataattagaacaagtaaataaggaaagtagccaaatatgtttaaaattattgttgaattattcttattagtaattatttcagcggcaattacaccgtttattcgacggcttgcctttgtcttaggagctgttgataatcctaatgcccggcgagttaataagaaaccaatgccaacgattggtggactggggatttttgttacttttaatatcggtacttttgttctgttgcgtgagcaatttccgactcatgaaattttttcgattttactcgcttcaagcgtaattgttttgacgggattgatcgacgatattttggagttaaaacctagacaaaaaatgtttgggatttttatcgcttcattgattatctactttttagctggaatcagaatgaatgtgttaaaggtgccattcatcgcacatgaagtaaatctaggttggtggagtttcccaattactattttttggatcttagctttaactaatgcagttaacttgattgatggacttgatgggctagctgatggggtttcaatgatctctctgactaccatggggatcgtaggttatttcttcttgcacactcatcagctatatgtcccaattgcttgttttatgttagctgcctgtttattgggctttttaccatataatttccatccagcaaaaattttcttgggtgatacgggtgcactttatattggttttatgatcgccgttttatctctgaaggggttaaagaatgtaacttttatttcattgttggtcccaattatcattttgggagtgcctattactgacaccgtttatgcaatgattcggagaaagctaaacaaaaagccaatttcagaagcagacaagcatcatttacatcaccagctgatgcgaatggggttaacgcaccgacagacggtattgactatttacgcattatcattggttttctcatttatttctttattattcctgctttcgccaacttggggcacttggcttctgatcttaggcttgctgattgccttagagtattttgtggaatcaattggtttattgggtgaaaaataccatcctttgatgcatgtaattcagaaaattattaatcaaaagagtaaaactgatccaacaattgaagtttggcacttaggagacgaaaaaccagatcaattgaagagtaaaaaaaataataagtagcaaaaaagcatttggaaatatcccaatgtcattaagttaagacattgacaattaatattagacttttaaagcactgatttaacatttaattggttaaattggtgcttttttcgtacaacaaataaggcatagcacagattctgcttttttaagctacgcgatataaataatatacagctgatttgggcttaatatttctcttgtccttgcggcctggtctaattggaatggtataatagctgatctgaataaggatccgttcaaaatcttgcgttaaagaagaagccaaatacatgctctgaataatcaagcatgattgcttgaaattgatggcatattgatacttgcaatgcttttgcggaatataggcctgtgcatcaatttgactgattgcattaaacataatcatatgggcataaatttccatttcaataaatttatcttgtttggaatggaactgtacactgcctaaagaatacttcaatttcttgaaggaggtctcaataccccaacgcagatgataaagctctttaattctttttagcggataattttttcgatcaagattggttagcacaacttcccattcttctttgcctgatttggcatcattaattctaaatttgcaggctcgaaattttattgtgcataactcgccaaaatcccagcttagatcctgggtatttttagagcgatacttaatatattggcgataatgatgctggacatggtgaatattctcactggctttatgcgtgatgtagtaatagttagaagtagttaccaggcaggaaatctcacgatcacattcttgatcaggcaatgtcgttatttctttaactccgccttgtccagccttagttcgtattatgtaatgacagttaggcaggcgattgcagttttcaatcatattgaaactagtgtagccacgatccattgttacaatatatggaccacaattcaaagctttaagcatttgaacagccgctttgcgttcatccatttctgatttaggctgaaaaatacaatcctggtaggtattattcaatagatcatataaggcattaacgtgaatttgacaatagggtttctttttatgagaagaagcttgtacaatgttattcgatttcggattccagatttgattaaagtcagagccatcaatggcaaacaaacggtagtgatgatcaaaaagttgaatattaaatagattttgattaaaaacagtcagaatatgtttaaaacaagcaggagaaagctggcttttgcgttgaacataggcagaagtactaactactttatcgttctttttagttgcatcttcgccaaaagctctaaagagttcactgtttaaattctgaccttgcatgttaattgtagttttaaggactgtcgctgcatctaaagtgcgtttcctggtaaaagcatgaggattattaataaaatcgtgaatatgatccccagtattattgataatttgatcaagacgttctagaatattcttatgaagggctttcataattaacaccatctttctggcaataattttgaaggtttaaaatatataatatataagataggcgaaaaggctggtcttttcgcctttattttatacaaaaaaagagatcgaatccaaatgattcgatctctaaaaaagcacccttaattgtcaatgtcttaacttaatgacattggaaatatccaaatgctctttttattgttcatgataattattagcttcaacaggaatttcattatagcgtttttcaccattagtaaaggtaacctgtccggccaataaattagttaggtcttccttaggtttagcttgttggtcatcgttaacaaaaatatgaattttaacatccacaccgtattcggtattggcaataaaaattttttgctgttttaggtaatgatcaacttcatcgaagcggttatagggtacgctaaaaattaattcttgttgtaaaacgcgtttaatgacgccgactttttcaacaacattggtgacactattggaataggcacgaattaaaccgcctgctcctaatttgattccaccaaaataacgggttactacgactgtaacgttttttaaattcattaattgcaatgcttttaattcaggaacaccagccgtacctgatggctcaccattatcgctttctttgacctggtcgtcatttaagccgatcgtgtaggcaaaggtattgtgcgaagcatcgcgatattttttagagattttttgaataaaatcatttgccgcatcagtagtagtggtgcgggcaatattggcaatgaatctgctctttttgataattaattcaccggtgccgttttctttaatagttaaaaaattttccttttctgacaaaataatcgcctctttttgcgtaatagataatagggaggtaaaaatatggaagatttgactctattatcaggtcgtcaatggattgttagtcaagaggattctagcacatttgagggatgccgcaaaattccagtaattgaaaaaggtaaatgcaatcgctgtggcagccaagttaatagtcgactgcctaatggtaaatattattgtcgtggttgtattggcttgggacgtgcaaatgagggcgattggcttattagaaaagacagtaataatactttttctcatgttaaaaacgggggattaagctggcaaggtaaactaaccccattgcagcagaatatttcggataaattagtacaaaattttgaacaaagaaaaaatacattggttcatgctgtaactggggcgggtaaaactgagatgttgtttcagttgattgctcgatgtatgaaaaaaggacagcgcgcttgtattgctacaccaagaattgatgtggtaaatgagctgtttccaagattttcggcagcgtttgcccaagttgagatcggtaagtatcatggccgtgaatttaaggaaatagggctagagcagttgacaatttgtactacacaccaattaatgaagttttatcgtgcctttgatttattggtaattgatgaggtagactcttttccttatgtaggtaatccgcaactacattttgcggccaaaaatgcggttaaaacaactgggactcgaatgtatttaaccgcaacgccaacgaacgatttgcttttggaagctaaaacagggaagttagaaattttgcgcttaaatcggcgttttcatggtggattattgcctgtaccaagagaaaggctttttatcaggccgtttttgcggaagggacaaattcatcctaaattaatgcaggagattaaaaaagtcattcaaagtggtcatcctttgcttttgtttgtaccacggattgaagaaattccgctttatcaagaagctttgcggaaaaagttgcaaaataaaattaaattggccggtgttcatgcacaagatccgcaacgattagaaaaagtacaggcttttcgtgatcgtaaatatgacttattgttgacaaccacaattttagagcgtggtgtaacttttaaaaatgtttgggtaattattattgcagcagatgatgcaatttataccgctgctagtttggtgcaaattgcaggtcgagttggtcgggctcacgatgaccaaacgggcttagttttgtattgttatcatcgttataccaagaatattcgacagagtattaagcagatcaaggggatgaatagatgagaacttgtttattatgtgagcaggagtttactccaccggtacaatttgcacaacttttttcttttaaaacagcgcgaaaaagtaaaatttgcttgcaatgtttaaaacaatttgaaaagttagcagacaatcgctgctctggctgtgataaggaactaggtcaaggctttatgtgtagcgattgtcgaaattggcaagccatttatggcgaaaatattctgcataatcatgctttatatcgttataattctgcttttcatgacttgatggttgcgtataagcggcgtggagattatgttttgcgggaagtattgcaagatttgtgttatgactatttgtgtaaaactaactatgacttttatgtgcccgtgcccacttcacctgaacatcaatcaagacgacagtttgatacaatttttgctatttatgctgatattttgccgctgacaccgcttctgattaaacaatcgggtagtcatgcccaaggtgagaaaaacaaagaggagcggcttaaaacgcctcaaagctttttgattgataaaaatattaaaatcaaggaaaatatagtttcaggaaaagtattaattttggatgatatttacacgaccgggcgcacgctatatcacgcgcgggaccgtttacagcagggttttcccgaaatgaaaattgaaagcttttcaatttgtcattagatttgttatgaaacgcttacattttttggtataataaatttgtaaagaaaaaccgcatagcggtgaaaggagaatcttatatgttaaagtacaatgttcgtggagaaaatattgaagtaactgatgctttgagaagttatgtagaaaagcggttaaacaagttagagaagtacttcgaattgaatcaagatgtgattgcacacgtaaacttgagagtataccgtgatcactcagctaaagttgaagttactattcctttaccatacttagttttgagagccgaagaaaccacggatgatatgtatcgtagcattgacttcgtttctgaaaaactcgaacgtcaaattagaaagtacaagactcgtgtaaatagaaagagtcgtgaaaagggattacaagatttctttgtagaacaacctgaagaagaagaaaagaagcctagcgaatttgatattgttcgtaacaagcgtgtaagcttaaagccaatggatccagaagaagctattttacaaatggacatgttggaacatgacttcttcgtttttgaagatgcagaaactaacggcactagcgttgtttaccgtagaaacgatggtcgttacggcttaattgaaactaacgaataattgagttaaaatactcgttaattcaaaacctcgcgtttgtttgagcgtggggttttttgtttagaatatttttattttgctgataaacatgttaaaattattctgtatttttagactttacgacatataaggaccgatttaatggtaaatattttaaagaaactatataacgacgataaaagagaacttaagaaatttgaaaaaatcgcagctaaggtagaagctcatgcagatgaaatgagcaagctatctgatgaacaattgcaagcaaagacaccagaatttcgtgaccgtttaaagaagggcgaaagtttggatgatcttttaccagaagcattcgcagttgctcgtgaaggtgctaagcgtgtattaggactttacccattccacgtacaaattttgggtggtattgcacttcactacggtaacatcgccgaaatgatgactggtgaaggtaagactttgacagcaaccatgccagtatacttgaacgcacttgaaggcaagggtgtacacgttgttactgttaacgaatacctttcaagtcgtgacgaagaagaaatgggtcaactttacaagtggcttggcttaactgttggtttgaacttgaactcaatgtcaccagacgaaaagcgtgcagcttacaactgtgatgttacttactcaactaactcagaacttggctttgactatttgcgtgacaacatggttgtttacaaggaacaaatggtacaacgtccattgaactacgctatcatcgacgaagttgactctatcttaatcgatgaagctagaactcctttgattatttctggtgaagctgaacaagcaaacagtgattacatccgtgctgaccgctttgttaagactttgactgaagacaagagcgatgatgatgccgacgatgatgaagatcacggcgattacaagattgactggccaactaagactatttcacttaccagaactggtattgaaaaggcttgtcaacactttggcctaaagaacttgtacgatgttgaaaaccaaaagttggttcaccacattgaccaagctcttcgtgccaactacatcatgcttaaggatatcgactacgttgttcaagatggcgaagttttgatcgttgactcattcactggtcgtgtaatggaaggccgtcgttactcagatggcttgcaccaagctattgaagctaaggaaggcgttaagattcaagaagaatcaagaacgcaagctactattacctaccagaacttcttcagaatgtacaagaagttgtcaggtatgactggtactgctaagactgaagaggaagaattccgtgaaatttacaacatgcaggtaatcacgattcctactaaccgtccaattgccagaaaagacatgccagacattttgtatccaactttggactctaagttccacgctgtagttgaagaaattaagaagcgtcacgctaatggtcaacctgttttggttggtactgttgccattgaaagttcagaacgtttgagtaagatgcttgataaagcaggtattcctcacgcagttttgaacgctaagaaccacgctaaggaagctcaaatcatcatgaacgctggtcaacgtggtgccgtaactatcgctactaacatggccggtcgtggtactgatattaagcttgggcctggtgttaaagaacttggtggactggcagttattggtactgaacgtcacgaatcacgtcgtattgataaccagcttcgtggtcgttctggtcgtcagggtgacccaggttacaccagattctacttgtcgcttgaagatgatttgatgaagcgttttggtggtgatcgagttaaggacttcttggatcgtttatcagataatgatgatgataaggttatcgaaagtcgcttgattactcgccaagttgaatctgctcaaaaacgtgttgaaggtaataactatgatactcgtaagcaaactttgcaatacgatgatgttatgcgtattcaacgtgaaattatctacggcgaaagaatgcaggtcattgaagctgataagtcattgaagaatgttttaattccaatgattcacagaacaattgatcaccaagtagcaatgtttactcaaggtgaacgcaaggaatggcgtcttgactcattacgcgatttcatttcctcaagtttgacttcagacaaggtaactgactcaattgacttcaagactattagtgttgaagatttgaagaagaagctttatgacattgttgagcaaaacttcgaagataaggaaaaggccttaggcgatcctagccaaatgcttgaatttgaaaaggtagttatcttgcgtgtggttgatgatcgttggactgatcatattgatgcaatggatcagttgcgtcaatcaattggtcttcgtggatacggtcaattgaacccattagttgaatatcaagattctggttacagaatgtttgaagaaatgatttcaaatattgaatttgatgtaactcgtttgttcatgaaggctgaaattagacaaaatcttagtcgttaataaagaaaaaggggagttaagagcttccctttttttgcaataaaataaaagatggtaggtaaaaatggaaattagtgaaattcaaagtgtgttagatgaactaaaaaaacgtctaaatcactttagggggtctctttgacttagatgcgattgatgaaagcatcgaaattaatgaaaacaagatggcgcagcctgatttttggaataaccaggaaaaagcgcaaaaattaattagtgaaaccaaccgattaaaggaaaaacgtgattcatttttaaaattgcaaactagctacgaagacgaaactactgcggttgaacttttgcgtgaagaaccagatcctgacttgcaaaaagaagttgaagcggatctagctacgctgcaagaagattttcataattatgagttagacctgctcttgtcgggtaagtatgatagccataatgctttgatggaaattcaccctggtgctggcggtacagaagcgatggactggggacagatgcttctaagaatgtatcaacgttattgtgatacagctggttttaaatttgaaatcaacgattatgagcctggtgaagaagctgggttgaagagcgttagtgcgcgaattgtaggtaaaaatgcttacggaatgcttaaatcagaaaatggtgtccatcgtttggttagaatttcgccatttgatgcggctaaaagacggcatacatcatttgcttctgtagaagtgattccagaagttgatgacagtattcaaattgatattgatcctaaggatttacgggttgatgtttaccgctctagtggtgctggtgggcagcatattaataaaacttctagtgccgttagaattacgcacttaccaacaggaattgtgactacgtctcaggcacagcgttcacaattgcaaaaccgtgaaactgcgatgaatgaattaagagcaaagctttttcacttagaagaagaaaaaaagcgtaagcaaaagcaggctctgaaaggcgatcaaaaggagattggctggggatcacaaattaggtcatatgttttccatccttacaacctagtgaaagatttgcggacaggtcatgaaacagctgacgctcaaggagtaatggacggaaaattgcaaccgtttatttattcctatttacagtggttgcttagtcaagagaatccagattaggttaaaaaatgagtttaatggaaattgtaacgcttgttttagtagcgctaattattttaagtttattgtttgttctatttaaggcatttattttacttttaccagtagctgtaattgcgattttaatcatttggcttatttatcggtttactggaaggaaaaatcaagataatatgccaagtagtggaagttatcgtgagtggtttaaggctactagtacttctggtcctagaccaagaaaaaaagctagaaatgtcaccactaaagatattgataaatagttaggaggcctaatatggctgatgaagttagattaagcaaattgatccaggacaatcagagtatccttgaagtttaccaaggacaggaatatatcaaagatgaagaaatttatgtttctgatatttatcgccctggattagaattaactggttattttgatttttatcctgcgcaacgaattcaattattgggtcggacagaaatttcatatgcggcacgcttggaccatgatattagaatgcatgtctttaacaaaatgtgtactaaggctacaccgtgttttttgatttctcgctctttgcctgtaccggaagaattaactacggcagcagaggaacacaaaatcccaattttgcgtacaagagagtcaactacctacatatccagtattttaactgaatacttgcgtgctcgtttagccaaaagaaccagcattcatggtgttttggttgaaatcaaagggatgggtgtgctgttaactggtgcatctggtgttggtaagtctgaaactgctttgggattagttcaaagaggacacagattaattgcggatgatcgagtagatgcttttcaaaaagaccataataccgttgtgggtgaagcaccaaagatcttaaagcacttaatggagatcagaggaattggcattattgatgtgatgaatttatttggtgccggtgccgtaaaaaatagaacagaaatccaactggtaattaatttggttaattgggatccaaaagctaattatgatcgcctaggttttcaagaaaatacgcgtgaaatctgcaatgtaccaattccacaggttaatattccagttaaggttggacgcaatattgaaattattattgaagttgcagcgatgaacttcagagctaagaagatgggctatgatgcaactcaaacttttgataataatttgactagtctgatttcagagcactcaaaagaagatacgaataaggtgccgcataatgactaatttagtaattaatccggtggcctttcatttagggaatttaagtgtcaaatggtatggcatcattatggcagtagccattatgttagcttgctggatggcgattaacgaaggaaaaaaacgtcaaattattccagatgattttgtcgatttgctattgtgggcagtaccgttagggtatgttggcgcacgtatttattatgtgatttttgaatggggttattattcacagcatcccgagcaaattattgcgatttggaatggtgggattgcgatttatggtggtttaattgccggcttaattgtgctgttgattttctgttataaacgaatgctacctccatttttaatgctggatatcattgctcctggagtcatggcagctcagatttggggacgctggggtaattttgttaatcaagaggcgcacggcgcaccaactactcttcattttttacaaagcttacacttaccacaatttattattgagcaaatgaaaataggcgggacgtattatcaaccaacttttttgtacgaatcattttttaatttgattggcttaatcttaattctatccttgcgtcataaaaaacatctcttcaagcagggagaagttttcatgacctatcttctttggtatagtgtagtaaggttcttcgttgaaggaatgaggacagatagtctgtatatttttggtataatacgagtatcacaggcattaagtttaatcctctttattgctacaattattttatggatttatcggcggaaagtcgttaatccaaaatggtatttggatggtagtggattaaaatacccgtattcaagagattagaattaataaaagattttaattagaaagtttgagagaaaaaatgacaaagattgcagttttaggtaatggttcatggggttcagtattgggttcaatgttagccgataatggtaacgatgtaactctttacggtaacattgatagtgttaatgaagaaattaacgctcaccacaccaatagccactatatgaaggattggaaattaaatgagaataccaaggctactggtgatttggaagcagctcttgatggggcagaacttgttttatttgttttgccaactaaggcagttagaatcgttgctaaaaacgtacgcaaggttttagataagacgggtgctaagccactgttagttactgcaactaaagggattgaaccaggcagtaagaagcttatttctgaaattttaactgaagaaatttatccagatgatgaagataagattgttgcaatttcaggtcctagtcacgcagaaaatgttgctcaaaaagatttaaccgcgattgcatgtgcatcaactaatgaagaaaatgctaagcgggtacaagaattgttctccaatgactacgttcgtttctacactaacgatgatttagtaggtgtagaagttggtggtgccgttaagaacgtaattgcgattgctgcaggtattttagtaggccaaggatatggtgatgacgccaaagctgccttgatgactagaggtttagcagaaatcactcgtttgggtgtgcaatactttggtgctaagccaatgaccttctcaggcttgtcaggtattggtgacttaattgtaacttgtacttcagtaaactcacgtaattggcgtgctggtaaacaaatcggcgaaggcaagactttagattacgttttgaaaaatatgggacaagttgtcgaaggcgctactactgttaaagctgttcacgaattatgtgaagaaaagggcattgatatgccaatttcagaggcaatctaccgtgttctttatgaagatgctgatgttgatacagaaattaagaaaatgatgggtagagaacccaagcctgaaattcgtttataaaagataagcaaaatagttggcaagaagttaaatctattgtattatttgcttatcaaaagtaagtagaaagaaggatagattatggctgataaatacgacgtaattattattggtgcaggtcctggtgggatgactgctggcttatatgctgcgcgtgctaacttaaagattcttgttcttgatcgcggtccctatggcggtcaaatgaacaatactgatgctatcgacaattatcctggtttttctgaaatcaaaggtccagaacttagtcaaaagatgtacgacacaatgatgaagtttgaaccagattataagtatggcaacgtacaaagtgttgaactcgatggcgaggataagttagttaaaactgatgatggcaatgagtatcgtgcaccgatcgtaattattgctacaggttcagatcataagcatttgaatgtgcctggagaagaagaatattcaggcaaaggtgtttcatattgtgccgtctgcgatgccgctttctttaaagatgaagatgtagctgtcatcggtggtggtgattcagcaattgaagaaggaatttatctttcacaattagctaagagcgttacagttattcaccgccgtgatcaattgcgagcacaaccaactttgcaaaagcgtgcatttgcaaacaagaagatgcatttcatttggaatgcacaaactgaagaaatcttaggcgatgacatgaaagtcacaggggttaagtaccgcgataaggaaactggtgccgaaaaagaaattccagttgctggtgtctttatttacgtgggtgttttaccacaaactgaaccttttaaggatcttggtatcttggatgaccatggttggattgtaactgatgatcatatggaaactaaggtgcctggtatctttgctttaggtgatgttcgtcaaaaagatttacgccaaattgctaatgcagttggtgaaggtagtgtagctggtcaagctgcatataattactaccaagacttacaagacaagaaaaattaaatttattcgttttttcattaagacatgttcgtattggacatgtctttttttgtctaaagcttaaattaatgactaataagttttataattaatagcagataatagaaaattgttaacagtttgaaagcgctttagaaatccaacttttaatgaatagaggacattgatggacgctaaagaaatttatacagaatggcaaaaagctactaatttaccagattatttaaaagatcaattaaatactttgggcaaggatgaaaaatggatcgaagatgcctttggacaggatattaattttggtactgcggggatgcgtggtcgtcttgaacccggtaccaaccggattaacttgtttactgtaggtcgagtaactgaaggcttagctcgtttaattgaagaaaatggtgctgatgctaaaaagcgtggggtagctatttcctttgattcaagatatcactcaagagagtttgcagaacatgctgccagagttttaggtgcacacggaattcatgtttacttatttgatgatttaagaccgacaccagaactttcatatgcagtacgtcatttgcatactttcgctggaattaatatcactgcttcacacaatgctaagcaatacaatggctataaagtttacggtgaagatggtgcacaaatggcaccagataatgcagatcgactttttgcttatgctcaaaaagtaactgatatttttgctgtcaaggctgcaccagtaaaagaattgcgtgctaatggcaccttgcagttaataggtgaagatgttgatgaagattacttgaatgaattgaagcaagtaactgttgatccagagatggttaaggccaacgctgacaagttaaagatcatttatactccacttcatggtacaggcaagatgctttatgatcgtgctttcagacaaggcggctttgataatgtgattcctgtgccaagtcaatcaatcattgatccagaatttccaaccacaattaagcctaatccagaataccgtgatgtttttgaacctggttttaagttggcaaatgaggtaaatgctaatgtcattattgctactgacccggatgctgatagaatgggtgcagcagttagaaaaactgatggtgatttccaagttttgactggtaaccaaattgctactttgatggcttactacctattggctcatatgaaggaaaatggtcaattaacccctgattatgagatcgttacttcagttgtttctagtgctttgccatttaagattgcagaggactttggtattaagactaagcatgttttgacgggctttaagtacattggtgaagaagttgaccggatgaataaagctggtgatgctaagttcttgatgggctttgaagaaagctatggctatttgtttaaaccatttgctcgtgataaggatgccatgcagggtgcattgatgtttgccgaagttgcttcatactatgcttcacgtgggatgactgtctttgatggtttgcaagaaatttggcaaaagtatggcgttgcttatgaaattacccgtgcaattgaaatgccaggtattggtggtcaaaagaagatggccgaattaatgagcaagttgcgtaatgagcacttaactgaaatcggcggtagtaaagtgcttaagattcaagatttcttgcaaaaagaaactattgaaaatggcaaaaagacaccattagaagggttcccagaatctaatgtgttgaagtacttcttagatgatgaaacctgggtagcacttcgcccatcaggtactgaaccagtaattaaggcctatgttggtgtaaacaaaaaagacattgccactgcagaaaaggcagctgaagattatcaaaaggctttagcagatttacttaaataattaagcatttttcgtgcgaaagcacgttcgcggtagtaaaatatagatactaattaaaaagttggactatgcttgtccaacttttttcttgaggagttttttatgattaaacgacaaaaaaatcgcaaatttgaattagtatcaaagtttaaaccagccggtgatcaagagcaagctattgataaactgactgctggatttaaaaaaggatataaagaacagattctggaaggtgcaactggtactgggaaaactttcaccatggccaatattattgctaagctgaataagcctacattagttattacgcataataagaccttggtagggcagctatatggtgagtttaaaagtttctttcctaataatgcagttgaatattttgtttcatactatgattattatcagccagaagcttacgttccacaatcagacacttatattgaaaaggattcggcaatcaatgatgaaattgatcagttgcggcatgctactacctcagctttaatggagcgtaatgacgtagtagttgttgcttcggtttcttgtatctatggtttgggtgatcctaaagagtatgcgcgcagtgtcttgatgatccatgaaggcgaagaatatgaccgtaataccttgttgcgtgatttggtaaatattcaatatgatcgtaatgatattgactttcaacgcggtcgttttcgggtccgcggggatgtagttgaggtctttccagccggcaattctaatcatgcttatcgaattgaattctttggtgatgaaattgatcgcattgttgaagttgattcgttaaccggtgaggtgatcggtgagcgtgagagtatttcgcttttcccagctacgcactttatgaccaatgacgagcaattgcggcgagctttgggagcaatttctaaagagatgaaattgcaggttaaaaagttcgaaggcgaaggcaaattgcttgaagctgaaagaatcaagcaacgtactacctatgatatggaaatgatgggtgaagttggctataccaacggaatcgaaaactattcaaggcatatggaaggacgaaaagcaggagagccaccgtatactttgttggacttcttcccagatgatttcttaattttaattgacgaatcacatgctactatgcctgaaattagagcaatgtacaatggtgaccgtaatcgtaagcaaaccttgattgactatggtttccgtttgccatctgcacttgataaccgtccattaaagctatccgaatttgaaaagcatgttaatcaaattttgtatgtctcagctaccccaggtgattatgaacttgaacgaacagatcataaggttgaacaaattattcgaccaaccggattgcttgatcccaagattgaagtaaggccaattgagggtcaaattgatgatttagttggcgaaattaataaacggattgaccgtcatgaacgagtctttgttactactttgaccaaaaaaatggcggaagacttaaccgattatttgaaggacttaggaattaaagtacgttatttgcactctgatattaagacgctggaaagaatgcaaattttgcgtgacttacggttaggtaagttcgatgtcttaattggaattaacctgttgcgggaaggaatcgatgtaccggaagtttcactggtagcaattctggatgcagataaggaaggcttcttgagagcatatcggccgctggttcagactatgggacggaccgcccgtaatgccaatggtgaagtaatcatgtatgctgatacgattactgattccatgagagcagcgattaaagctaccaagcgtcggcgtaaaattcagatggaatttaacaaagagcatggcataacgcctaagacaatcattaagccgattcaagacgtaatttcgattactaaaccgtcgagtgaaaaagaagaaaaatctgatagttttgcagatcttaattttgatgaattgacggctaagcaaaagaagacaatgattagcaacttgcaagagcaaatgcaagaagcagctaagaagcttgactttgaagaagctgctaacttgcgggatgcaattatggaattgcaaaaatcatcaagaaaaggaaagaattttaatggcaaatgataagatcgttattcgcggagcacgtgaacataatttaaaagacattaatttaactattcctaaggataagttagtagttattactggcttatctggttcaggtaaaagttctttagcctttgatacgctttatgcagaagggcgtagacgttatgtgcaatcactttctagttatgctagacagtttttggggcaaatggataaaccagatgtggattcaattgatggtttaaatccagcaatttcaattgatcaaaaaacaacgtcacataatccacggtcaacagttgggaccgtcactgagattaatgattatttacgtttgctttgggccagagtaggccatccaatttgtcctaatgatgggacgctgattcaacgacaatcagttgatcagatggttgaccgagtgatggctttaccagaaagaacgaaaattcaaattttagcgccagttattcgtgctaagcgtggagaacacaaggaagtatttaagcgagtgcaacgtgcaggatatgttcgtgtaattgttgatggtgagatgcacgaaattggtgaggattttgaattagctaagaacaagcgtcactcaatcgatattgtcgttgaccgtttgattgttaaggatagcattaagtctcgcttatttgattctattgaagctgcacttcgtttgtcagatggctacatgaatgttgatgtaattggtggtgaaatgcttaacttttctgagtattatgcttgtccaaagtgtggctttactgtgggtgaaatggaaccaagactgttctcctttaatgcaccatttggtgcctgccttgattgtgatgggttagggatgaagttagcagtagacgaagatttggttgttccggacaaaacaaaatctttagctgaaggtgcactggctccatggaagacttccaattactatactgaaatgttggaacaagcttgcacggcattaaaaattccgatggataagccttttaataaactaactaaacgtcaacgcgacattattctgcatggctcaactaagccggtgaaattccatgtaactggtgactttggcgttaatgataccgttcaaccatttgaaggagtaatggccaatgttgagcggcgttataaacgaccaatgtccaagtttatgcgtgatgtgatgggcaaatatatgactgaacttacttgttcaacttgtcacggcaagcgtttgaatgaaaaagcattagcagtgaaagtcatgggcaaggatatcgcggaagcttcggagctttctattgataaagcacttgatttctttaaggacgtcaaattaagcgagcaagagactatgattgctaagccgattttaaaggaagtacgcgatcgtctttcattcttggatagtgtaggattagattatttaactctttctcgatcagctaataccttgtctggtggtgaagctcagcgtattcggttggcaactcaaattggctcaaacttatcgggagttatgtatgttttggatgaaccatctatcggtttgcatcaacgtgataatgatcggctgattgcttctttaaagagaatgcgtgatttaggcaattctttaattgtggtagagcacgatgacgaaacaatgcggcaagctgactatttggttgatatgggacctggtgccggtgtttacggtggtaaagttatggcacaaggaactcctaaagaagtagagcagaatcctgattctttaacggggcaatatttgtctggtaaaaaatttgtgccggttccattgaagcgtcgtaaaggcaatggtaaaaagattacaattactggagctcaagaaaataatttaaagaatattaatgttgattttccgttgggcaaatttattgtggtcagtggtgtctcaggttctggtaaatctactttggttaatatgatcttgaaacgcgctttagcccaaaaattaaacaataattcaactaagccaggtaagtataagtcaatcaagggttacaagaatattgaaaaaatcatcgatatcgatcaaagccctattggtagaacaccacgtagtaatcctgcaacttatactagtgtttttgatgatatcagaaccttatttgctcaaactaatgaagcaaaattgcgtggttatactaaagcaagattttcgttcaacgtcaaaggtggacgttgtgaagcctgtcatggtgatggaattatcaagattgaaatgaactttttgcctgatgtatatgtaccatgtgaggtttgtcacggcactcgttataattctgaaacattggaagtaacttatcggggaaagaatattgctcaagtgcttgatatgacgattaatgaagcaactaagtttttcgaaaatattcctaagattcagcgtaaactccagactatcgttgatgtaggtttgggctatgtgaaattaggtcaatccgctacaactttatctggtggtgaagctcaaagaatgaaattagctgctgaattgcaaaagctttctactggtaaaaatttctatattcttgatgaaccaactaccggtttgcataccgatgatatcaagcgtttattagaagttttgcagcggttggtagatgaaggcaatacggttttaattattgagcataatcttgatgtaattaaaaatgcagattggctgatcgacttaggtcctgaaggaggggaacgtggcggtcaaattgtggctaccggtacgccagaagaagtagcgaaagttaaagaaagctatactggtcagtatttgaaaccagtcttagaacgtgatactaaactaacaaaagaagcaaaaaaataggctagaagacaatagccaatagtttttattaaccttgaataagtgtaaaatagtctgcaaggaggaataaaaatggatattttttctagttctagagataatcacggctttgactggggcgcatttattgccggtatcttaatggtcgtagttgcgttcgtgttattacgtcacccagctaaagggttgcatgcatttgtcttgatttttgctattgtatcaatcgttcaaggtattgtatggttggctgcttactcacgctttcgtgaatttttctcacgtagttgggtagcaattgtgtcaggtgtattagatatcattatcggtatcttgttcatttgctcatatgatattggtggtttgactatcgcttacttatttgcaatctggttctttgttgattcagttgtaggtattgcttggtcatggcacttacgtgcattttcaaccggatactttgtatttaacttgattttgaatattttaagtttgattattgccttcttcttaattattaatccagtaatcgcagccttaagcttagtatggttagttgcattctggttattagtctttggcattaatgaaattgtggttgcatttatgcaccgttaatatttgataaaaatttaagccgaaaggcttcttttttttgcacaattatgacacacccggtatgatataatttgtaaagaggaggatttcagtatggctgatgagaaaaaaaaattattaatagtcacaggcatgagcggagcaggtaaaactgtggtcgctcatgacttagaagatatgggctactttgtagtcgataatcttcctccaactttattaggtagtttttgggatttaattaataattccaatgactttcataaggtagccgtagtaattgatttacgagttaagacattttatcgcgatttattggatgaagttaattcacttgaagataatggcaatgtgcaagctactatcctatttttggatgcttccgatgatgtcttggttgctcgttataaagaaacaaggcgtcttccgcctttagccaataatggcaaaggtcgcttgcttgatggcattcaagaagaacgtcgtattttaatgccaattaaaaatagatcaaattatattatcgatacgtcaaacttgtcgactaaggaattaaagcaaaaattaatcaatacatttagtgatcgcaagcggcagccattttcaattgaagtgatgtcatttggctttaagtatgggatgccaattgatgcagatattgtaatggatgtgcgttttttgcctaacccattttatatttcagaattaagaccatttacgggactggacaagcgtgtatttgactatgtgatgaacaaagaagaaacacaggtcttttataaaaaattgcttgatttgcttgaaacagctatccctggatatatcaaagaggggaaggaaaagttgaccattgcaattggttgtactgggggtcaacaccggagtgtttcaattgcccaacagttggcacgagatttagctaaaaaatatccagtcgatattactcaccgtgaagtgagtcgttatattagaaagtaggtgcgcacctgtgccatatggagaaacaaggattgttcgcgtgattaaaggcagacgtccccgtgtagtcgtaattggtggcggtacgggtttaccagttattttgaatgccttaaaagatcaaaacgcggaaattactgcaatcgtaacggtttcagatgacggcggttcatctggttcaatccgtaactttattaacgtagttccacctggtgatatccgtaatgttttggtatcacttagtgacttacctcaggaagaaaagaatatttttcagtatcgatttgattcatccgattcctttttttcaggacatgcaatcggtaatttaattattgcggcattgaatgaaatgcatggcaatatctttgatgcagttcaatctttgtcaaaaatgatgaaaattgatggtcatgtttttccagcatccaatgaaccattgactttaaacgcagaattcgtggatggaactacggagtctggtgaaactgaaatcacatctaaagataagcggattaagcgtgtctgggtgaccgatactgattcggatgaagagcctagagctgttttaccagtactggcttcgattatgcaagctgatgcagtcgtacttgggccaggtagtttatttacttcaattttacctaacttaatgatctctaatttaggtgaagcagtgcgtgagactgacgccgaggttatttatatttgcaatatcatgactcagcgtggtgagacagatcactttagtgatgcggaacacgtacaggtaattaacgatcacttaggtggaaattatatcaataccgctctggttaatggtgccaaaattgatatgagcaaatttcacccagaagattatgatgcttatcttgagcctgttaagaatgactttgaaggcttaagaaagcaaaactgccgtgtcattactgatgactttatcgatcaacgtcatggattggtatttcatgatggtgaaaaggtaggaaaagaaattattaatctggcatttgaatcaatgtcacgtaaaagaatgaaggaaaatgatggctagttatgctagtgaagtcaaaaaggagctaacttcgcttgaggtgcatccagagcatgccaaagcagagttagctgcttttttgcgaatgaatggtgtattaaacttgcacgatcatcaatttagcctagatataactacagaaaatcctgcgattgctcgacgaatttttaagctgattaagattgcttatggtattgagccattgctgattgtctcgcgcaagatgaaattgaaaaaaaataatcaatatttggtacgattgaatcagaaggtacaagaaatcctagaaaacttacaaatctgggatcctgaaaaaggtttggtaacgcgaattccgcagagaattatgacttcacgtgaaggagcaatgtcctatttacgcggtgcatttctagccggaggtagtgtcaataatccagaaacgagtcgttatcacttggagatttattcaacttatgaggaccataatgaggatttatgtaagttgatgaataattatttttatttaaatgctaaagcaactaaacgtagaagaggctatattgtttatttaaaagaagccgcaaaaattggcgactttttgcatatagtgggtgcacttaatgcaatgcttaactttgaagatttgcgtattatgcgagatatgcgaaattcggttaatcgcttggttaattgtgataccgcgaatatgaaaaaaacagcctcagcttcagctaagcaggtagaagacatccagctgattgaacaagaaaacggcttagatgatctaccagagaaattgcaagttttagcgcgttttagattggcgcatccagaattaactttaaaggaagtagctaatcaaattccggatggtccgatttcgaagtcaggagttaatcaccgatttaagaaactacatgagttagctgagagtttaagagaataagaaaaaggagcctgcacaatgacaatgtcattaagttaagacattgacaattaagggtgcttttttagagatcgaatcatttggattcgatctctttttttgtataaaataaaggcgaaaagaccagccttttcgcctatcttatatattatatattttaaaccttcaaaattattgccagaaagatggtgttaattatgaaagcccttcataagaatattctagaacgtcttgatcaaattatcaataatactggggatcatattcacgattttattaataatcctcatgcttttaccaggaaacgcactttagatgcagcgacagtccttaaaactacaattaacatgcaaggtcagaatttaaacagtgaactctttagagcttttggcgaagatgcaactaaaaagaacgataaagtagttagtacttctgcctatgttcaacgcaaaagccagctttctcctgcttgttttaaacatattctgactgtttttaatcaaaatctatttaatattcaactttttgatcatcactaccgtttgtttgccattgatggctctgactttaatcaaatctggaatccgaaatcgaataacattgtacaagcttcttctcataaaaagaaaccctattgtcaaattcacgttaatgccttatatgatctattgaataatacctaccaggattgtatttttcagcctaaatcagaaatggatgaacgcaaagcggctgttcaaatgcttaaagctttgaattgtggtccatatattgtaacaatggatcgtggctacactagtttcaatatgattgaaaactgcaatcgcctgcctaactgtcattacataatacgaactaaggctggacaaggcggagttaaagaaataacgacattgcctgatcaagaatgtgatcgtgagatttcctgcctggtaactacttctaactattactacatcacgcataaagccagtgagaatattcaccatgtccagcatcattatcgccaatatattaagtatcgctctaaaaatacccaggatctaagctgggattttggcgagttatgcacaataaaatttcgagcctgcaaatttagaattaatgatgccaaatcaggcaaagaagaatgggaagttgtgctaaccaatcttgatcgaaaaaattatccgctaaaaagaattaaagagctttatcatctgcgttggggtattgagacctccttcaagaaattgaagtattctttaggcagtgtacagttccattccaaacaagataaatttattgaaatggaaatttatgcccatatgattatgtttaatgcaatcagtcaaattgatgcacaggcctatattccgcaaaagcattgcaagtatcaatatgccatcaatttcaagcaatcatgcttgattattcagagcatgtatttggcttcttctttaacgcaagattttgaacggatccttattcagatcagctattataccattccaattagaccaggccgcaaggacaagagaaatattaagcccaaatcagctgtatattatttatatcgcgtagcttaaaaaagcagaatctgtgctatgccttatttgttgtacgaaaaaagcaccaatttaaccaattaaatgttaaatcagtgctttaaaagtctaatattaattgtcaatgtcttaacttaatgacattggcacaatgagtgcaagctccttttagagtgtgaataatttttaataattaattacttcttcttattaaccatgatttcgtcaatcaaaccatattccttggcttcttcagcagttaagtagttgtcacgttcagtatccttttggatcttttccaaaggttgaccggtagtttcgtgcaaaatttcgttgatcttcttacggctcttcaaaatttcgttagctgcaatttggatatcagtttgttgaccttgagcaccacctaatggttggtgaattaaaacagttgagttaggaagtgcgaaacgcttacccttggtaccactagtcaaaaggatagaagccattgaagctgccataccaattgcaatagttgatacgtctgacttaataaagttcatggtatccatgatagctaagccggaggtgattacaccacctggtgagttgatataaagtgaaatatccttggtattgtcttgagcatcaaggaagagtaattgagcgatgattgagttagccatttggtcattaatttcaccgctaagcatgataattctgtcttttaataagcgtgagtaaatgtcataagcacgttcaccacgagcagtttgttcaataactgtaggtactagcataaatttgcctcctaattgatttcgtattaattagcactctttcaagtacagtgctaattaaatcacttcgtaatgaaagtgtcaaataaagaagctcaatggtaacaatggtaataaaaatgtattttagctaacagtgtttatatattataatataaaagtaaaatgcaaaatataagatacggaggataggtttgaagtattcaaataaaattttaactgctacttcagctgtagcactgggtgttggtttgttaattggttctacaaatgcagtatttgcagataattctaaaactactgatagtaatacagatactgctaagactgattccagtgcgaagaagggaccagctcaaacaagtacttcttatgacttaatggttaaagtaggtagcaataagaattatcctgtttataaaaagattagtaatggtaaacctagtggtaagattgctgatgctagcgattatcaatatgctcatattcaatctgaccagagaattaagacaaaggatgcaacttattggcgtatttatgtaaatggtcgtaaagttggttatgttaaccaaaactactttacaagagatgctatcgctgtaccaaagactatcagtttagtacaaaatagtcactacgattttgatccaactgatgcagtaagttatgtaaccaattatatgggtactgtaattgatacagcagatattaagatttcagaagatgcaatcgattgctcaactccaggtacctataatgttaaatatagctatggtaaagcaaaggcaactgttaaggtaactgtcagaaagagtactaaggaaggaattgctgatgctgatagcgtccaagctaagccatttaacggcgatttgaaatcctggaagacttactacggcagttctgctaactatgtaactaagactgattttactcctgataagaataagcatgcttatgatagtgaaagcggaaaattagatttcactactcgcttcttccaaccagttttattaagtgtttaccgtgacattaaaaatgatgactatattaaccgtgtaggtcatattcctgaaggaattaccatgtcaaatggctggttgtacactagtttattaagtagtaccctgattagcaatggtcatattgtaggatataatcttaaccatttaaccaatgcatttaacggacaatacttacttgatatgagccaaaagaagttcaattcttacgttaagaacattaaagttagtccatatattccaattggtcacggtcaagcaatgggctcaactgataaatacatttacgttctaaataacaataataaggtttcatacaagagcaatatgtctgaagagttaatccaaattcggaagagcgatatgtgcattaacaagatttggactattaaatgctggaacggtagtgattcagacggtcgttacttcaataatggtgttgttgtaaatgatcacaagctttacacaactctttataataaagaaaaagaccaaactgaatactgggaattcaaccgcaaaggcgataactggtatccaactatggtaggtgcaactaagggtggcattgtagcaaacacatacactcaagggtttacttatgatgccaagaacaataacttctaccttgcattcaatgacgtaattgctaagattgcaactgatggtgaagttaaggatacttaccaataccacactggtcgtgaaattgaaggtatcgcaacctacaacaacaagttatacatgaacttagctcaacgtgctgaattacttgaaagtaaacaaaagttgactaagtaatcattatcgatattaatttaaataaaggaaattcaatgaaaatattggatttcctttatttttttagttgtataattagaaaaatgagttatttagttaggcaaaagaatgaaaatattagaattaaaacatatccaatatagtgcagataaaaaacaaatattgcaagatgtatcatttaaggttaataaaggcgattttctaaccttaattggcccatcaggtgcaggaaaaagtacgattttacgattgattgcaaatttaattagtgctaattcaggcgatattctatatcaagaaaaaaacattagctccttaaatccagttcaatatcgtagagaagtttcatattgttttcagcagccgtctttatttgggcaaacagtaagagataatttgattttcccgtatgaaattagaaaagtagatgtaaatgacaagcaaatagctgatttacttaatcaagttgatctctctgctgattttttagataaaaagattactgctttatcaggtggtgaaaagcaaagagttgcgttaattcgaaacataatatttttaccaaagatattgctcttagatgaagtaactaccgggcttgataatcaaagtaaagatattgtacataatttgattaaggatgtttctgagaaaggcgtgacaattattcaagttacacatgatcaaagtgaaattgatgaagcaagtaatattttaagagtaaaaaaaggcggaataatcgaatgaaaaatgttgtagttagcaactggtcgttagtattagcttttgcactggtgttagtttccattggaatttctgcgaaagaaaaattaggactaaccaaggatattttaattagcgtgattagggcgataattcagttagtcgtaatcggctacgttttgaagtttatttttcatgttaatgccttgtggctaactttggtttcaactattgtgataatttttaatgcatcttggaatgctaatcagcgtgatcctaatccggggcggaatatttggaattcgataatagccgaagcggtagggacttacgtgacattaggaattctgattttttctggcgtaattaaaccagtccctatgcaggtcattcccattacggggatgattgctggaaatgaaatggtggcagttggcttatgctataaagcgttgaatgatagctttaatgatctgcatcaacaagttttagaaaagttggctttgggtagtgatattaaaactgcatcgatgccaattttaagaaggagcattaagactgcgatgcagcctacgatagattcggctaaaactgtaggattagtaaatttgccaggaatgatgtccggcttaatttttgctggtgtaaatcccatttatgcaattaagtatcagattatgattacatttatgttactttctgccactggccttggagccgtgattagtggctatttggcttataaaaattactttaatgataggatgcaattgaaataggcagtatgataaaaataattttctacatttagatttagttaaattatatttcataagcgtttgtaaaggtgatttaagttaacttaaatcatatggtaaaatttgagttaaaatgaatttaatttttctagctattgtaaatatcaattttgtcatgtttagataatttagccataaataaaaaccccgaaattcatgtccgaatttcggggttcatatcatgatcaaagtttgagcttcattattttattgggctgatttttgttttaaaaactgctgttttttcatcatttgtttttgcaactgcttggcatcgttaactgacattactttccagttggagggaatagaaaaaatatattctctgtgttttaactccttgtcatgaccaaagacgccaaacattatttgattaaaggtattgctataggtgtagcgagtagtcttaatcgttacttttggttggctgcttcgttttacttttgtcgatactttatctaatttaatacgcgtggtgctagttaaatcgttctagacaataagccaaattataagctaaaattgcaatttccaaccggctttgaaagcctatcagactacgtgctcgattgttctcggcattgtaataggtcagaagcgaaaagtcgctttcaattgttctgcgaatagccatcaattgatgatcattgtgctttttagctcctgtcatatttttacgatatggtgtccaaagttcgtaacccatttgttttagctgttgatgcagttctttgcctaaatagccttcgtcgccaagaagatagtaattagatggatgggtattttctatcagttcaactgtctccctggcatcatgaactgatgcctttgttacgacataatcaagaatgtaaccgtcatcgctaacaatggcatgaactttgaaaccatagaagtaaattttcttggtggccttataaccaatgttggcataaccgcgaaaaattttagcacgatagtttcgaattggttggcaaacaggtaccggaaagctgtcaatgatcaagaactgtccattcaggtcaacctttttattcatttcttgccgtatctgataaatcaattgcaatagctgacgtgaacgccgattaaaacgtgagtgtgataaacaattgaaacattcacagaatcttctttgtgattcaattcctgtcttagcttgccagataagtaaagccaaaatcagactgtccgtagttttaatttgatcaatatttcgccgatgagtaaactcagccggtgcatacaaacgataccagtgccgacaaattatcactaaatctttaaaactaacttgtaaatggtggctaaaacgcttaagcttaaggcagttcaatcagatcagactcttttctattattactatttacaagtcgagtctaacaagattggacttttttattaactaaaacgatttaactagcaccacgcgtaatttaatagattttggcttcttttgaagctgaccagttttataaaggtaaactttttcagttccattacctaaaggctgataaagcaaaattggcaggcgaggagtagcactggaaactagagtattagtgcttgaagttgtttcagttttcattccccagtgattataatcatgttctacaatgccaacaacacaaagaattgttacgattaatgatagccatgcaatagaagtatgcctttttccagggatgatattaaagtaaataaacataattgcagctacgattagaattaaaagtatcatttaaccatccaccttttcttgatgttcacgtgctcgattgcccttctttaagaagaatgaaagaactaatgcgattaatgagaagaggatactcattgcaaatgaagcatgaaaaccgtctaaagttgcactgattgctctagtcttgtattcaagtggcagtgcatgaagtaaacttttaccaggcatattattattggtagttgtagttaaaacagataccaaaattgcagtaccaattgaacttaatacctgtctgaaagtgttgttaacagcagtaccgtgagaaatcttgtttaatggtaaagaattcataccagatgtagtaacattcatcattaccaaagctacaccgaccattctgattgcgtaaagaatgataatcatcgtgtatgaactttgttcagttaaaaagacgaatggaatagtcccaatggtcaacaaagtcataccagtaattgccattttacgtgcaccatatttgtcgaataaacggccagtaattggcgacataataccaatcatcaatgcaccaggtagtaacattaaacctgaatggaaggcagaaacgccacgcaaattttgaatatataatggtaaaaccatttcaatgccgaccatcgctaagttggtgataccacttaaggcagctgccagtgaaaattcaaagtgtttaaaaacggtaatgtccaaaaatgggtcatccattttcaattggcggataccgaataggattacaaatataattccaaatccaataaatcctaaaatctcgggattggtccagcctttgttaccagcttctgaaaaaccatacaacagacttccgaagcctagagtagaggttgttactgaccaaacatcaattttttctttcttagttggtaaaacatctttaattaaaaagaaagctaagataattactattcccgcaattggggcaatgatgctgaaaagataacgccaagaaaggttatcaacaatccaaccagataatgttggtccaattgccggtgctaagccaataacaatcccgacagttcccattgctgcaccacgtttattagctgggaagatggaaagcatgattgtttgtaaaagtggcatagtaacgccgacgcctaatccctgaatgattcttccagcaagcagggtgccaaaattgggtgcaattgcggcgatcactgttccaataaagaagattgacatggctgacaaatacatttttcttgaaccgaagcgattgattagccatgcagaaattgggatcataacaccattaactaacagaaaggctgttgaaagccattcagcagttgcggtgctgatgttaaatgaacgcataattgaaggaagcgctgttgaaagcagtgttccgtttaatacagtacagaaagaacctataattaaaactaaaactagtaggtttcgattataagcttttccatgaatatccgttggttgcttgttcatgtaatattcctttctcttataaaagttaactataaaaactataggcttaaaattttccattgtcaaataatcttacaaataagttagataaattaacacaagtgttgcaaaagataacaacaatatataaaatataactatactgtaaggtggtatcaggatgaaatctaaaaaaattatgcatgacatttttcaaaatttagaaattggaatcggtgaagttagtaaattgaccggtgtttcgcaaaggcaattgcgctattgggaaactaagggctacattaagccgatttcagatgatcaaagtggtgtgcgccgctataatttagcgaccttgtatctaattgtttttatcaaggaacaattagatgagggctttacgttgtctgcagcctttgagcattcaaaggatatacggttgaagagtagaattgttcatcaatttttcagagaaacttttgatgatgttaaggttactgattctacaaagggctatggggaaattgacttaggtgaatttcaggccgaagatggcagcatgcaccatttcaaaggtgttgtagatgaaaaaggacaatacgttaagatggatggataatgcaatttaaaaggaaaatcttccattagtgtatgtgctacaattaaatcgtagttcacatatattaatatgggagaaaaagaatgaaaaaacgatttttaattgcaggtgcatcagctgtgatgatgaccttatctttaacggtattgagttccaagccagttaaggcagccaaaaatgccgttgattttatgacatatctatctaaaaacaaatctttgactaaagggcaaagaagctctgctagatcagcagtgaaattattgaaaacaggtcgcttaggtaaaaagcctaaggcaagttggtacaatgaatacgttgacttgcattcaaatgatgatgcaactagtgctaagaatattaaagctgtattgccttatttgaatagtgtcaatagagcacgtagaagtgaaggggttcggtcattaaaggtgtcaccacttttgacagcagcctcaatgttaaatgctgactatcaaaaacgtggtggcttaaagcatactcattatttcaagtcgattggtttggaaaacatcgctactcaaagtgtgggtttagatccggttgatacttggttctctgaaaagaaaagttggaattatgatgtaaaaaagaatcattcgttgaagccggcgaagtatagtccaacttggacggcaacttatgatgcggccgtagagggcacgaacggctataaaatggcaggacactacttgaatttgattaacagaaattatagagtaatgggatttgccaatgtaagcaatactggttatggaaatgctgattcatatttaggaagcagtaaaggtgcaggaattagcgttgccaagtacaaggcattggtaaatgcttgggctaataaataaaaatatacactaaaaaggaagcagtcttttgaaattgcttcctttttaaaattctgtatttaaattttattttgcctttgcttcttgatatttcttaattcctggcaaaattaaacctaatgcaatcaagacgattggcgtcaagatattaaggaataaggtaaatggatctggtgagtaaatacccaagatacaacatgcagcagtaactacaaaacaccaaataccggcagtataggctaagccttgatgtttagtcatttgataagtagtgttgaacttttgctgctgttttcttaaagcaacatatgccgcaaatacccaaaggtaacgaagtggcatagtagttgaatttaatttaactaattgtgccataacagcttgagcatttggtactaaagcttgaatagcaattaagccaccagagaggacaacaaccatccagataccgttgatgtaagcaccatgcttgttgagttttaataagccctttggaataaattctttagcttctttactacccaaaagcattctaagtggtgcatcgatactgattactaatgttgagaattgaccgattacgttacaccatgaatagatgtacatgaacaagccgccaacatggtaatattcgcccagcttgtcaaatgccatgtaggcaccattagagatgtattcgttaaggttggcattaaccaccttagggtcaaacattaatgccatggcaaaagtacctaaaatagcagataccataaccatgattgctaaagccatcatagccttagggaagtttttggaaggatccttaaccttattaacataaggggagatcttttcacaaccaccaacggcaaatactaggattgaaagagaagtaaagtattttacgttgaaggttggcatcaaattcttccagttaaagtcaatactgtggaaaccagcagaaggattaatagctggtgcggcaaacatcataatgatgaataagattgacatgataaacattgaagaaccagcaattgttgctaggcctttcaatactggaataccacgacttgcaacccaacagaaaagcaagaagactactaatgtagcaaattgtgtccaagcggtaggtaagccatcataccattttgtatttccgaagataccccaggccatcgctcttaaaccaccagtacctttactggaaatataaacaacgtggcaagcccagtaggtccaacctgcgtagtaggcccattttgcgcccatagtggcatttacccaagaggaaaccccaccttcagcattcttgaaggtagctccaagttcaccaaccattaaggcataaggaacaaagtagagaaggaacatgacgatccagctaaagacaacctttgtcccgtcaaagtagacgtacccattaacaacgttaccaaagccccacacggtagagaaggccatcattgctagggtggtccacatcatctttttggaattattttgtgattcgaccataaaatttctccctattactatttatatatttatgtgaactttttaattatataacagaagcgttttcaaagtcttgttgttcaggaaattttttaataattagatgtttcatttgataaatttgtgctaaaatgaacgtgattttttcatatgggaggattaataaggatgttaaaagggaaaaagatgttattaacttttgtggccagtgctgcattagttggtggtgtttttgccattagtcaaagcaaggtagatgccaaaagctacagcaaggcagttactaagattgctggcaatggtaattacgctatttatcataatgtatctaaaaaaggaccatcaggtgcattttcaaataccaagtactttaagcatggtcaaattcaatctaagaagtatgtttctaccaagaaaggtaacttctggtacattattgtcgatggacgcaatgtaggttgggtaagtcaaaacttttttgctagaaaccaaatttcagtagctcaagatgttagcttagttcacaacagcaactacagttttccaactagggatgcaattaactatgcaacagatggacaaggtactgcaattaatccagatagggttaatgtttcacatagctctgttagttcaagccgtgccggcactactaaggtagattattcatatggtaaggcaaaggcaagcgttaatgtaactgttcgttcagatacaaatgaaggaattactagtgcaggtgcttctgttaagagtggtcctaaggcagttcatacttggaatggtggctcaaagggatcatcaagaaattggaatcaggcacacggttatcgttcagaaactagctcaaatagctattcaggtaacggcatgactttgcgcactcgtttgttccaaccacgttttgtcagcttaggctatggtcaagctgctgatgcaatgggacaagttggggtaattcctgaaggtattactgttaatgatggtatttttacagcttctatgtacactagcagtagcgactcaagaggacatcttgtttcttacaacttgaatgcaattaagagtaaatatgctgctcaaaacttaactactatgggatggagcacttttagaagctacgcaaacaatattaaagtttcaccatacattaagctaggtcatggtcaatcacttggctcttcttcaagctacatttatgttttggctaataacaataagactgctaattcaacagcttcagaagaaattatgcaagtaagaaagagtgatatgaagattaacaaaatctggactgttaagacctggaacggcagcagtgcatatcctcgttacttccataatgcaacctttgttggcgacaacactatgtatgcattgttccacaatggtggtcgtcaccaatatgaatactggaagttaactagaaatggtgacacttgggctccagaagaaatcggtgctactcaaagtaatttcgtaactggttcaccagttcaaggttttgcttatgacagcaaccacaatcaattctatattggttttaacgactacatcttccgtgtagcagcaaatggtacttataagggtagccatcatttcaacactcgccgtgaaattgaaggtttatctgtttcaggctcaactttgtacactgagttagcacaacgtgctgagttgatgactacaagcactaaataattgtgatattgaaaaaggcattccgtgaggaatgcttttttggtataaaaaaagaagaataccgagatggcggtagtcttcaacatgtagttatatgggccccctgggagtcgaacccagattctaagaaccggaatcttatgtgcgatccattacactaagggcccagatgattcacaagtggtagtatatcaaaaaaagtaatgaaataaaaatgattttactcgatttacgacttttttaaaatcgtgtatctttttcttgaattacgaaaaatacattgttatactaacagtgtcgattgggaaatgtatgaattgaatgaaaagtacgtttctcttatatttttaagcattctgggacacaaaacgacacgtaggtggtcgatagatgtcccatggaaaggagggaacgatggattcggacttttctttgctcgaagcgctcgttcccgacgtcttaaagattcttcgacaaaggtatcttgtccttgagcagatttcgctacatgcgccaattggacgtcggagtgttgctcagcatttagggctttcagagagaaacatcagaactgagactgagtacttatgtcaattaggattgattgaaacaaaaagttttgggatgtttttaactgaaaagggtgagaaaacattaaaagatgcaggaccattgcttgatcgcctctttaatgccggtgaaacggaagtagcattagccaaaaaattagggattgaaagaacattgatcgtccctggtaatgcggatttccaagaccgagtatatgaggagatgggagaaaaattaagttcagctttgaatttactcttgcctttaggccattcaatagttacaattctaggtggagcggcgttagctagatctgctaagtatttatcaccagatttagctaacaatcgccagttggaatttgttccaggtcgaggagctttgggcgaaaatgtagagacgcaaagtaatacaatcgtccaagaaatggctgctaagacttcaggtacttataagacattatatttacctgagcaggtttcagatgatgcttacaaatctttgattcgtgagtcctcgatcgcagatgttctgcaagacatttctcaaagtgatgctgtgattcatggtattgggttagctcaagaaatggcacagcgcagaggctataattcaattaagctatctgaacttcgtgagaagagagccgtcaccgaatgtttcgggtgtttcttcgatgaacatggcaaggttgttgaccgcatcacccaggttggattgcagttcgagaacctatacaaaataccccacatatttgcttttgcttgtggtgcccgaaaggctcaagcaattaaagcttatatgcctaatgcgcctcatcaaacctggctaatcactgatgagggcgcctcaaatatgattttaaaggggaaatgaaatcccgtttaaaataaatgttgtttatagttcttaaggaggactttaggttatgacagttaaaattggtattaacggtttcggccgtatcggtcgtttagcattccgtcgtattatggaccttggcgaaaagtcaaaggacattgaagttgttgctatcaacgacttgactactccagcaatgcttgcttacttgcttaagtacgacactactcatggtactttcaaccacgaagtttcatcaactgaagattcaatcgtagttgacggtaagagttaccacgtatacgcagaaccacaagcacaaaacattccatgggttaagaacgatggtgttgacttcgttcttgaatgtactggtttctacactagcaaggctaagtcacaagctcacatcgatgcaggtgctaagcgtgtattgatctcagctccagctggtaacgacttgaagactatcgtttactcagtaaacgaagacactttgactgctgatgacaagattgtttcagctgcttcatgtactactaactcacttgcaccaatggctaacgctttggacaaggaattcggtatcgaagttgctactatgactactatccacgcatacactggtactcaaatgactttggatggtccttcacgtagtggtaaggaacaagacgctcgtgctgctgctgaaaacatcattcctcatactactggttcagctaaggctatcggcttggtattgcctaacttgaacggtaagatgaacggtcacgcacaacgtgttccagttccagatggttcagaaactgaattggtatcaatcttgagcaagaaggttactgctgacgaagttaacgaagctatgaagaagtacgaaagcccatcatttgcttacaacggtgaccacattgtttctagcgatgttcttaacatgactgctggttcaatctttgacccaactcaaactatggtaaccactgcaggtgacaagcaattagttaagactgttgcttggtacgacaacgaatactcattcacttgccaaatggtacgtactttattacactttgcaactctttaatcattaattttaattaactgattatatagttaagtggtaattgagaaggcggagggagattcttccttccgcctttttttgaagaaaaaatatcaaaataatcggaggattataatggctaaattaatcgttgacgatcttgatgttaaaggcaaaaaggtcttagtacgtgtagactttaacgttccaattaaggatggcgttattggtgacgacaaccgtatcgttgctgcacttccaactattaagtacatcattgaacacggtggcaaggctatcttacttagccacttaggtcgtgttaagtcagatgctgacaagaaggaattatcattaaagccagttgctgaacgtttaagtgaacttcttaagaagcctgtaacttttgtaccatcaaacgaaggtaaagaagttgaagacgctatcaacaacatgaaggatggagatgttatcgttcttgaaaacactagattccaagacatcgacaacgactttggtaagcgtgaatcaggtaacgatcctaagcttggcgaatactgggcaagtcttggcgacatgtttgtaaatgatgcatttggtactgctcacagaagtcacgcttcaaacgttggtatcgcaactgctatgaaggaagctggcaagcctgcagcagctggttacttgcttgaaaaggaaatcaagttcttaggtgatgctgttgaaaacccagtacacccattcgtaactattcttggtggtgctaaggtttcagacaagattggtgttatcgaaaacttaattcctaagtcagaccatattttaatcggtggtggtatggcttacacattcttagcagctcaaggccacagcattggtaaatcattatttgaagctgacaaggtagaccttgctaaggaattacttgctaaggctggcgacaagatcgttcttcctgtagataacgtagccgcaactgaattctcaaatgatgcttcacgtgaagttgttggtgatgatattcctgacaacatgatgggtcttgacatcggtcctaagactgttgaaaagttcaaggaaatcttgaaggatgctaagactgttgtttggaacggcccaatgggtgcattcgaaatgcctaacttcgctgaaggtactttggaagttggtcgtgcattggcagaccttaaggatgcaactactatcatcggtggtggtgactcaactgctgctgctaagcaattaggcattgctcctaagattacccacatttctaccggtggtggtgcttcacttaactaccttgaaggtaaggaattgccaggtatcgcttgcgtttcagacaagtaatagtaaggaaaggacaatagattaatgagtcgtacaccaattattgctggtaactggaagttacatatgaatccagaacaaactactgaattcgttaacgctgttaaggataagttaccagacccaagtaaggttgaatcacttatttgtgcacctgcagttgaccttgacgctttgagaaaagctgctgaaggctcaaacctacatatcggtgcagaaaactgttactttgaagacgaaggtgcttacactggtgaaacttcacctaaggtcttgaaagaaatgggtatggactacgtaattattggtcactcagaacgtcgtggttacttccacgaaactgacgaagacattaacaagaaggctaaggcaatctttgctaatggcttgaagccaatcatttgctgtggtgaatcacttgaaactcgtgaagctaacaagcaagaagactgggtagttgctcaaattaaggctgctttagacggcttaactgctgaacaagtatcttcacttgttattgcctacgaaccaatctgggctatcggtactggtaagactgcttcatcagatcaagctgaagaaatgtgcaagactattcgtgaaactgttaaggacttgtacaacgaagaaactgcagaaaacgttcgtattcaatacggtggttctgtaaaaccagctaacgttaaggaattaatggctaagcctgatattgacggtggcttggttggtggtgcttcattagtaccagaatcattcttagaattggtaaactaccaagactaattcataaaaaataatttagattaataatctagaatttttagggtcaaatcattagatttggctcttttttatatagtttgatagctaaaaacaagttcgttgataaagtaaataaaaatgatcaagccattgataaatcacttgatcatttcactatattttttaatagaaattaaagtcgctgattgtaaaattaaattgaacacttaataaaaaataaaaagtccattcggacctgtttgatagaatgtagttaccacacaacatttagaaacgaggtcaaaatggactctttacattctaccatgaatcatcacattaaaggcaagcatttatcattcgaggaaagagttattattcaattgcgtttgaaagatggctattctttgcgtgccattgcccgtgaattaaactgttccccttctactatcagttatgaggttaagcgcggtactgtagaactgtatcatggcaaagtcaaaagatataaggctactcaagggcatgatgcatatcaagctcatcgtaaaaattgtggacgtaaatcagactttctcaggaaaactcaattcatgcgctatgtccacaaacatttctttaaagacggctggtcgcttgatgtgtgcagtaatcgcgccaccgctgttggcgcatttagcagcagagatgttgtctgtactaagactctttacaattatgtcgaccaaggtctattagatatacataattacgacttgccagagaagcttaaacgcaataccaagcttcatcgtattcgcagaaataagaaaaaacttggcagaagcattgaagaacgtcctaaagaaatcaataaacgtaatgagtttggccattgggaatgcgatttagttctcggacataagagcaaagatgatgaggtgctgctaaccttatctgaacgtatgagtcgtgagttcttaattcttcgtattcctgacaagacttctgtcagtgtcatgcaggcctttaaagaactccaaaggcaatacagcgaacattggaatgatatttttaaaaccattaccactgataatggctcagagtttgcagatctttcaagcttagaagacgtatcaaatactttagtttactatgctcatccttatacatcttgtgacaagggaaccgttgaaagacataatggactcattcgcagatttattcctaagggagaggcaatagacaattattcactacaagacatcatagacattgaaacctggtgcaactctttaccaagaaagatattggcatatcatacaccagatgaaatctttgaaagagaattagatctaatctatcaagcagcttgattaaaagtgttcaatttattattgcaatttacgtagaaattaaagttgtcttgtttagaaaaatagatgtactaagttaaataacaaattattaagctataagctagctctaaatgcattatttagctatctttaaagtaaaataataacatctagcccttgtatttttggctgaacgaagtataataagctatggaggttgaatcaaattagatttaactttcattattcagtctctgcctaataattccttattacttaataaatataaactttatggcagaagatacatctatatctatatcactttctagaagagcagttatgaaaattttcatgactgcttttttgtttaatttggatttacctcaaatccaattggcggaaaactaggcagtttcaaaggcgtaacatgccattgtgtaaatagaacggatgtcaaaagaataaaggggacgtcttcaggcttagtaatatcacaaattaaaacgcctccgcgatctcccatgattgtttggacacttgctacactcttgattccagaacgaaaagtataagtaccacgtttaatactacctgtaacaatatactttaattgggtcaaatagaatatgtttgcagtaggtgtgtttaacttttttacgcctactaaagagtggttgacgacatcaattgtgaacgaagcaattaggcccgcaccatcagaaaacagacgtcccacttcctgtttacggaaattatttagatataaagtgtggtttggattatcaagattgccttgaataaaaaattcagcttttccattttgattaagcacaggaatttgaccgtaatccttttcctgattaagttctagccaaaatcgcatacttactcacctcataactttaaatattgttattatctgcaataaatttatttaaaatataagctactccatcttcattgtttcgcttggtgactacctgagctattttcttaatagctggaatcgcattacccatcgcaacgccagtacctgctgctcggatcatactctcatcatttaaattatcaccgattgcagcgatttcctcaggctcgataccttttaacttggcataatcaagtaaggcaagacctttttgagcatgttgctcattgatttcaatattagaagatgaacttgaagttactactagatcgcccattgtagcgatttcttttttgatatcggtaaaagcttcatgtccccgagagtcaaaagcaataattttcattacttctattttaggatcttgcaataaattatcgaaactgtggatttgtttcatattcataatagtcttattaccagcagaaattgctacagcttgacgaaaatcaagtagaggatttagatctaccattaaatgagctacatttgaaatacgttgatctagattttcactataaacctgattggcagttaaaatttcaaagtaaaagcctgatcgatgtagtaaatgcactagctgttgtgcttttgccttgggaatactgtgtttgatcattaattgctcattttcgtcaaaaaccagggcaccattaagattgataaaactggtatgcaaatcagcatctttgagaactgaacgtgattcgcgtggggcccggccagtcgcaattaaaaattcaatgccgctactttgtgcatttttcacagcttttgcattagcagcagaaacagccatctctgaattaaacaacgtgccgtcaagatcacaagcaactaatttgatcataatttctctcccatttagtattaaattaatgataccataaagaggagaagaaaagagggtgtaagacttggctaaagaattaattggcaacgattgggatcaagtattggatcctgtttttgcaagtgagaaatatcacgaattgcataattttttaaaagaagaatattctactaaacaaatttatcctgatatgtatcatatttttacggcttttaaattaacaccgtttgctaaaactaaagtggtaattttgggtcaagatccatatcataatcctggtcaagctaatggaatgagtttttccgtcatgccaggtacaactttgccgccatcacttaaaaatatctataaggaactctatgatgatgtcggagctcggcctgttaatcacggttacttaaaaaagtgggccgatcaaggtgtgcttttgctgaatgcggttttgacggtaccgtatgggcatgctaacggtcaccaaggcaaaggttgggaagatgtgactgatactgcaattaaggctctgagtgagcgtggaaaagtcgtctttattttgtggggtcgatttgctcaaaacaagattccattaattgatcaaagtaagaattttatcattaaatcatcacatccaagtccattttcggctgatcgagggttctttggctcgcgaccgttttcgcggtgtaatatggcattgaagaactttgatgaaacgccgattgactggcaattgccagaaacgataagtaaatctgatttagcataagaggtaaaaaatgagcgtattttcattattcaaaaaacaagttgaagcagcaaaagataagaaaagaattgtttttccagaaggcgatgatttaagaattcttactgccatagctaatttgaaaaaagatggcattatcgaaccaattttaattggaaatccagatgagattgctaagttagttaaagaaaataatttagacttagctggtgttaagatctatgacctcaatcattatgatgaacttgatcaaatggcagcggaatttgttaaagctagacgaaaagataccagtattgctgaagcaaagctcaagttagcccaaggtaattactttggtaccatgttggtgaagatgggaaaagcagacggtatggtttccggtgctgctcactcaacggctaacactgttttgccagctttacaattaattcatgcagctaaggggatgcatcgagtatccggcgctttcgtaatggaaaagggcgatgagcgttacatttttgccgactgtgccatcaacattaatcctgatgaagaaactttagctgaaattggctatcaatctgctctgactgccaagatggccgaaattgatcctaaggtcgcatttttgagcttttcaactaagggttcagccgaaggaccaatggttgataaggtacatgatgcagcagctatgttccaaaaggatcatccagaaattccagctgatggtgaattgcaatttgatgccgcttttgtacctgcagttagtgaaaagaaggctccaaactcaaaggtagctggacatgcgaatgtctttgttttcccagaattacaatcaggcaatatcggttataagatggttcaaagattaggtggcttcactgctgttggtccaattttgcaaggtttagcagctccagtgaatgacctatctcgaggctgcagtgaacaagatatttatgatttagcaattgttactgccgcacaagctttagcaaaggatgaaaagtaatgacaaagttagaaattaattctgctgatggaatgcagaaattaggtgcatccctagccaaaacggcccagccctacgatttattactattaaatggtgatttgggtgcaggcaagacaaccatgactcaaggattagggcgagcattaggcatacatcggcctgttaagagtcctacattcaccattgtgcgtgaatatcgagaagctaagttgccgctctttcatatggacttttatcgtttggaaaatgatgatttatcctcgattgatttggagggctatttagcagaaccaggtttagtggtaattgaatggccacaactagtaatgaatgatttgccagatgagtatttgcaacttacgattaccagagtggacgatagttgggattcaactaaacgggttgttgaatttactcctcatggtaagcgcaatgaagaatgggtcaaagctgcgttaactgaatttaataagtaaagcaaaaatctctaggatcaaaattcctagagatttttcatatctgataaaccaaatttttgattgcttcatcaccaaattgctcttcttgcttgattaaaatcccagcacatgcttcactatcacttaatgcgttatggtggtgccacaattcaacgtttaaggcctcagaaactgtgtctaatttgtggtcaggcagttctggttcgagtaatttactgctagctaaagtgtcaatgaccaaatagtggggctcctcaataccgtaacgtgccaggctttgccgcatgacattagtatcaaagcgagcgttatgtgcggctacaagcattcctggttgatacaattctttaatgtggggccagacctctgccattgttggagcgtttttaacgtcctcagctgtaatttgatgtacttgaatatttcgcgcgtcaaatggcatttgaggattaattactgtataaaagcgatcaacaattttattatttctcaccattaccaaagcaagtgaacaggcactttctggataatggttggctgtttcaaagtccattgcaataaaattcataaaattctccttttaaaaaagtatatcattaatattaatgaagctaacgcctttatgcggtaaaataaaacaagaaactttaaggaggcaacagcgtggaattacttgatttgaaagaaaaagggattgatattaaagagcaaatcccattaagcagatatacttttactaagacaggtggaccagctgaatatttggcctttcctaagacgactgatgaagtagaacaattagtaaaagtcacacgtgaaaatgaaattccattaacaattattggcaatgcctcaaatttaatcatccgtgacggcggaattgatgggttagtaattattttgactgaattaaaagagattaaagtagaagataatcaagttacagctgatgctggtgcacggattatcgatacagcttttgcggctgctcatcatggtttgagcggaatggaatttgctgctggaattcctggtagtattggcggtggtatttttatgaatgctggtgcctatggcggtgagatgcaagaagtagtgcaaagcgttaatgttttaaccagagcaggagaatttaaaacatattcaaacgcagaaatgaacttttcttaccggcattcattagttcaagaaaatggcgatattgtattaagcgccacttttgcactcaagtcaggcgataagttagagatcttagatcatatgcattatttaaatgctttacgtcgttataagcagccacttgaatatccatcttgtggcagtgtctttaagcggcctactgggcactttgttggtccgatgattattaaagctggtttacaaggtaaacaaatcggtggcgctcaagattcaatgaaacatgcaggttttatcgtgaataaaggcggtgctactgcaacagattatttgaatttaattcatttgatccaaaaggtaattaaagaaaagtttgacattgacttacgcacagaagttaggattatcggcaaagaaaagtaaaatattttagcaaagacaagctacaggctggaaggcttgcagctgttttttatgtgagggatggaaatggatattatcaaactaaaacacatcaccaaaaaatatgatgatgggtttgtagcattaaaagatataaatttaactattgaatctggtaaattttattcactacttggtcctagtggctcgggaaaatcgacaattttgcgaattattgctggctttactcagccatctagtggtcaagtcctctttgatggtaatgatattactgaccttgatgcttcaaaaagacatatcaatacagtttttcaaaattatgctttgtttccacacctggatgtttttcaaaatgtggcgtttggcttgaaaattaagaaaagaccaatgagtgaaatcaagccagctgttaaagatgctttgcatatggttcgtctagacggttacgctaaccgcgaaatttcggaacttagtggaggacagcagcagcgtgtagctattgcccgggcaattgttaatgaacctaaggttttactattagatgagtcgctatctgctttggataaacgtttacgaaaagacatgcaatttgaattacgggcaattcagaaaaagctaggcattacctttatttttgttacgcacgatcaagaagaagctctatcaatgagtgatgaaatttttgttttaaatgatgggcagattcaacaaagtggtaatccggtagcaatttacgatgagccagtgaatgactttgtagcacgttttattggtgactccaatattttatctggtcgaatgattcatgattacgaagtggaatttgctaataataaatttaaatgtgccgatggtgggatgaagcctaatgaaaaggttgaagtagttattcgtcccgaagacttggatattgttaaaccagaagatgggaagattgtggttacagcacagacgcaattatttttaggtgatcactttgagattaaggcaattgatgccaatgaaaatgaatggctgatccattctactaatggagttaaattgggacaacgtgttgggctcttttttgatccagaagatattcacgtcatgcggttaaatgaaagccaacacgattttgatgctcgactagaaaagtatgaggcggatgaaaatgaaaaataaaaagatgttttttatgattccatatctgctgtggattattctctttgtcattttgccgattttattgattctctggtattcgtttactgatagtaataacgcattcacgctcagaaattacgttgaattttttaaaaatggtacctttttaaaaatgatgcttaactcattttggtatgcatttttgatcaccttgttgacgttggtaatttcgtatccggcagcgtattttttaattaaaatgaaaaaccagcagctgtggctgttattgatcattttgccaacatggattaatttgctgcttaaagcatatgcatttattggcattttaggtaatgacggtttagtaaataaatttttacatttatttggtattggtcccgtaaatattttgtttactgattttgcttttatttttgtggcgacttacattgaaattccgtttatgattttgccaatttttaatgcgattaaagagattaatcctgcagtcattcatgcctctgaggatttgggtgctagtaaatggcaaacttttcgctatgttttatggccgctttctcgtccaggagttgaaagcggcgttcaggccatctttatcccatcattgtcattatttatgttaacaaggctgatcggcggcaatcgggtaatcacattagggactgctatcgaagagtattttatgaccacaatgaactggaatatgggggccacaattggagtaattttaatcgcgctgatggtggtagtcatgttgattactagcaaaaaggctagaagaaagaaggtagatttatgagaaacagacatttaatcgctaagatctatcttgcttttactttgatcctattatatgtacccattttttatttgatttacttttcattttctagtggtaaaaacatgaataaatttgagcactttacatgggctcattatcagactttatttcaagataatcgcttattagcgatatttttggaaactatcctactagcgctgttgtccagtttaatagcaacaattattgggacatttggtgcaattgcaattgctgcgatgaaaaaagaatctaataagaaaacaaccttagcattaaacaatgtcttgatggtgtcacctgatgtaattattggtgctagttttttgatcttttttacagcattgggaattggcttaaattttggttctgtattgttaagtcatattgccttttctattccgattgtggttttgatggtcttgccgcgacttaatgaaatggatatgtcgcttattgatgcagcacgtgatttaggggcgaattcatggcaggtttttagtgatgttttaattccagttattatgccaggcatcttttccggtttatttatggcgttgacctattcactagatgattttgccgtaacttttttcgttactgggaatggtttttcaactctttcagttgaaatttattctcgggcacgacaaggaatcgatcttgagattaatgctttaagtaccgtaatgttcatttttgtcttgttgcttgtaggaatctattattttattactactaaaaagggcagaaagaaaaatcatcgtgtgatgggaggcctagttaaatgaaaaagattatgatggcaattgcagctattttaattgcctgtgcaggcctttggggtttatcccatcatttggagaaatcgtctaccgggaaaaataaacaaaacttgattatctataactggggcgactatctagatccaaagttaataaaaaagtttgaaaagcagacaggttatcatgttgtctatgagacctttgattccaatgaagcgatgtataccaaaatcaaacaaggcggaacggcatatgatttgaccattccttctgagtatatggtaactaaaatgcgcaaggctcatttgcttgatcagttggatcaaaagcaaattcctaatttgaaatatattggcaagagttttttacataagtcatttgatcaaaataatgattattctgtgccatatttctgggggacactaggaattgtttataatgataaattcgtcaagccaggggcaattaagacttggaatgacctgtggagtaaaaagtatcgcaggcaaattttactagttgattcagctagggatgcaatggggatggcattggtttctttaggatattcaatgaataccacatctagtattaaactacatttggcacaaactaagcttaatagtctgggacccaatattaaggcgattatttcagatgaaatgaagatgtacctagtgcaaaatgaggcagcaattggcgttacctggtctggtgaggcttatgaaatgatggaacaaaatcctcacttgcattatgttgtgcctaagcaaggatcaaatttgtggtttgataattttgttattcctaaaactgtacaaaataaaaaagctgcacttaagtttattaattttatgcttgaacctaaaaatgcagcgcaaaatgcggaatatgttggatatgcaaccccaaataccgcagcccaaaaattattgccgaaaaaagttagagatgaccggcagttttatcctactcaaagtacgttgaagaatctacaggtctttagagatttaggtcctaagaagacccaagaatataatgacctatttttagaatttaaaatgtatgcacggtaaattggggcggttataattaaagaagaaaggagcaatcaatgcattttaatatttctaatctgtttacttggaataatttctccattgctttagatattttaatcatttggtatttagtttaccgtttgatcatgatgattcgtggtaccaaagcagtacaactggcaaaagggatcgtctttatctttattgttagaattattgccggcttactgcaactgcatgcggtaacttatattgtggaccaaattgtttcttgggcagtaatcggaattatcgttattttccagccggaaattcgtcgtggactagagcggctaggacgcacgccgatttttaatggccgaggtgagagtgctcatacacagtcggttaagatggtgcaggagctcgataaagcgattcaatacatgtctaaaagaagaattggtgccttaatcacgattcaacaagatacggggctagatgattatattgaaactggaatcaagctggatgcggatatttctggtgaattattaattaatatttttatccctaatacgccgttgcacgatggtgcggtaattatcaataataatcgaattgctgttgcagcagcatatttaccactgtcagataacagcatgattcctaagcgtttaggcacgcgtcacagagctgccgttggtatttctgaagttaccgatgcggtaacgatcgtcgtctcagaggaaactggtggcgtaactattactagaaacgggcgctttttagtagatttgtctcgtgaagaatatttgaagtatttgaatgctcaacttgttcctaaggaagagaagaaggttccatggattcgtcgtgtgattaataaagtctggaaatggggtgcagatcgatgaaagacttttgggataaacgctgggtaatcagaataatctcattgctgtttgcgatcttattagtggtttacattgactctactcaaacaggttttgttacacagggtgaatctaagaagacacggcaaactgctaatgaaacgcagacaattagtgttcctctgcaagtttcggttaatacagataaatactatgttgttggttatcctgaaaaggttaagataactttggagggttcgaatgcgttggttacttcgactgttaatactcaaagcttccgtgcttatattgatctaactcataagaaaataggtaagcaaaccgtaaaggtagaagttacgggactaaatagtcaattatcttacacgattaacccggcaacagttaatgttgatattgaacggcgaaaatctcgtaccatgcccgttcaaatagagtataataaaaatgctgttgctaatggatataatattggtacggctagtgttgatccgcagcaagttgaggttactggtgctagaagcgaagtaaatcagattgatcagatcgttgccaagttgcctttacctaatggcattaatcatgattatgagcgtcaagttattttgatagctgaagataaaaaagggcgtcaattaaatgcagtgattaatccatctacagtaaaagctagtttgccaatatcgcttttcaaaaagaaagttaagctaaatttaaagcctaaaaatgaaaaaaataataaagtctattcggttactgccaagaatgatgaggtaacactgtatggacaaaaggaaacattagcaaagattaagcagttggatgttgatgtagatctgaaaggaatctcatattcaactgtaaagaattaccctttagttttacctaagggagttgctcgcgttgatcctgaaaatgtacagatatcaattaaagtaaagaatgcgaataattaatttgagaaaggttgtttattaaatgttaaaatatttcggaactgatggtgttcgtggcgtagctaatcaaggcttaactccagaaatggcttttaaattaggtcgtgatggtggttatgttttaactaagaacaaaaaagacggcgaacaagctaaggtattagtatctcgtgatactcgtatttcaggccaaatgcttgaatatgccttgatttcaggccttctttcagttgggattgaagtgcttgaggttggcgtaattactactccaggtctttcatacttagtacgagcacaaggcgccgatgcaggggtgcaaatttcagcttcacacaaccctgtagaagataatgggattaagttctttggtagcgatggtttgaagctttcagatgaaatggaaggcgaaattgaaaaattaattgacgctaaggaagataaattacctcgtccatctgctaagggattaggtactgtaactgacttccacgaaggttcagctaaatacttgcaatttattgaaaatactattccagaagacttgggtggaattaaggtagttattgatggagctaacggtgcttcaagcgcattgatctcaagactgtttgctgattgtggcgttgactttactactattgcaactcacccagatggtttgaacattaacgatcatgttggtgcaacgcatactgaaaagttacaagaagaagttgttaagcaaggtgctcaacttggtttagcctttgatggggatgctgaccgttgcattgctgttgatgaaaatggtaatgaagttgatggtgaccacatcatgtacgtactcggctcatacttggcagaacatggtcgtttgaagaaagataccattgttactactgtaatgagtaatcttggttttactaaggctcttgaaaaagaaggcttgaagaatgttcgtacccaagttggtgaccgttacgtttctgaagaaatgcgtgctcacggctacaatctaggtggcgaacaatcaggtcacgttattatgagtgattatcataatactggtgatggcatgttaaccggtttgcatttaatgctcgtaatgaagaagactggtaagtcattaagtgaacttttgaaagactttaaagattacccacaatgcctagttaatgttccggttgctgacaagaagagctggaaagaacaccaaccaattcttgatgaaattgctgcagtggaaaaggatatggctggaaatggtcgtgtacttgttcgtccatcaggtactcaagacttgcttagagtaatggctgaaggaccaactcaagaagaaactgatgcctatgtagaccgtatcgttaaagtggtcgaaaaggaaatgggtaagtaaaatcctaattgaataatcgataagtaaaaagtcgtgagttaaatcacggctttttgtataattaatgctagatgtaatttttaagatccgagggattaaaatggctattaaattgatcgcggttgatttagatggaactttattatcaagcaataatactattttgccagaaacgcaaagaatgttgcgtgtcgcagtacaaaatgggattaaggttgttttagctactggacgaccattatcaggagtattgaactttgctaagcaattaggaattgaaggtgatgatcaatatgcaatcgtctttaatggtgcagtaattcaaacaatttctggtcgtgttttaatgagtcaggaattgaattatcaagacttcaataatatgttgcgttttcagcgtttaagtcatgtaaatgtacattttgagacgactaagtatttcattacaactgatcgggatttatctgtgcaaatgcaaattaatgcggctttgaccgataatattatgaaagttagagaccgaaaagaaattccaaaagattttacttttaacaaagtcggttttacttcaactgaaggagctgaccaggtagaaaaactgtggaatagtttccccgactgggcttttcagacttatgacattgttcgcagttttgacagtattattgaattaaatgccttgggagcttcaaaaggtaatgctttaatggatttggcttcacggctaaaaattgcccaaaaagacgtgatgatttttggtgatcaaggcaatgatctttcgatgttttctaatcccaacttcatgaaagtagcgatgggtaacgccattagtgagatcaaagataaggctgattatgttactgatgataatgatcacaacgggattgcaaaggctttgaaaaaatttgttctttagtaaaaaatttggatttagaagtgatgttttatggcagaaactaaagacgatcgtaattccattacccaatcagaatgggaagttatgcgtattatttggaccttaggagaagttcgtactggccaagtaatcaaagaactacaaggtaaaaaggattggtccgattccacaattaaaacgctaatgcggcgtttagtgcaaaagggcttgctaaagacgcgtaaagaaggccggtgttttgtttataagccgactattagtcagcgcaaaatgatgtctgaagttactttacatatgatgcaaaacatgtgtgatatgcacaagggtgaggtattaattcagttgctaaaagaagcaccgctttctaagggcgatattaagacgatgcagcaagaacttaaattgaaagaaaaggatgctcctgacatggtgccttgcaattgtttgccatctgaaaaaagtagatgttaggggaagatttttagatgaagaacatcgtcaaaataatactacgtttgataatggtcggcctagccgcagtatctttttggttattaatgactagcaatgtgaatttaaaaataaacgatacacaggcgatgggcaaagaagtaatcaatcgagtagtggatgactcagataatcctaatttgaaggcaggggttgagttactcgaagcatctggtttggaaaagacattgttagaacaattgccgccgaaatatcaagttaacttatcatatgctgatctatatagattgtgtgaaaaatataatgatcagggaaaattgaccactaaagatttaggcttaactagtaaaagtaagttggaagaaattatcaatgaatatttagtcaagcaaattaatcataaattgaaggaagattcagaagatgtgaaccatattattacaatttatgagtattcaatttttgcagtggctttgttatttttgttagccgcaattttgattttatttggtcgctcttcggcgtcaattccactagcactagctactattgcttcatttgtggcattgtggcttgcctcaaatgaggcgatgaccgcattgcaaagtcgagtttatagtggcattcttgtaactttgtcgcaggagatttgggttggcttaacagttggagttattacggcgattatttggccggttataaatagactaactaagaggaagaaaaggtaatgaaaaaaattctgtttgtttgtcatggcaatatttgccgctcaccaatggcagaggccgtgatgcaatatttgttaaaagaaaataacctagcagatcaatatactgctgaatctaaagcaactacgcaggatgctttaggtcatgggattgatgctcgtgcacaacgggaattagttgcaaaacatattccatatgatcgtggtcatcgtgctagtcaaatgactcgctcagactatgataattatgaatatttaatctgcatggatgaagaaaatttcgcagatatgaatcgcattactggtggagacccagagcataaagaacataaaattttagagtttgctggctcttatgctgatgtcgatgatccttggtatacaaatgattttgaaacagcgtataatgaaatttatcgtggctgtgaaggcttaattaagaaattaacgaaataaaataagatgggcatcgagctcatcttatttttgtgcgattaaacgaacaatattttcagttgtacgggtaacatttattggtccatcttttagggcttgctcaatatcttctgctttagcaagaatgccaaatatagcggtaaatccttcatcatagagttgatcaataccttgatctaaatagcctgctaaagaaataacaggaatgtgatattttttagcaattttagcaacaccaaagggtgttttaccaaacttagtttgaaaatcagttccgccttcgccggtaaaaacatagtcagcgtctttgatcttggcttcaagcttagtttcttgggcaattaattgcacgcctggatgaatactggcgttagtaaaggcgatcaggccagcgcctaggccgccagcagcaccactaccagaaatttgggcgacgtttttatcaatagtctgctcaattacttgtgcatagtgagataaattttgatctagaattttaacagttgtatcatctgcgcctttttgtgggccgaagacgctacttgcaccattaggtccagttagaggattggttacgtcactggctaataaaaattgggtatctttaatacgaggattaattgaagaaagatcaatattgacaatttgatctaaagcaccgcctgctagcttttgggtgatttcatgatgattttgatcaaaaaatttaacaccaagtgcttgtgccataccagcaccgccatcatttgtgctgcttccgcccaggccgatgataatctttttaacgtggtgcttcaaagctgcgttaattaattcgccggttccataagttgtagtctttaaaattgtttcgggagttcgtttactttttgcaacataagagagaccactagcttgtgccatttcgatgattgcagtttgtccatcacctgagatgccataataagctgatactttttgattaagcggaccggtaacatttatttggtatttttgcccgcctgtagcgtcaaccaatgaatcagttgtaccttcgccgccatcagccattggtactgcggttatttgtgcattgggaataactttttgaataccatttttcattgcaatgcagacttcttttgctgtcatgctttctttaaatgaatcaggtgcaagaacgaatttcattttaattacctcgctttttagttcattgtaaaatattttgcattttttcacaaaattatattgacaccgcttacaatgttggctattataataactgtaagtgagcggattactgatacgatcaggtcttagctattacaaataatgttgcgttggtatatcattatttgtgatagctttttctttttttgctaaggtggtgaattattatgaaatttcttaaaacatttaataatagtgctgccttaattgaaaataaccaaggtcaagaagaaatagtcctaggcaagggcgtaggatttggtctaaaaaaaagtgatcctgttgatgaaagcaaaattgaacgtcgcttcgttactaaagacgaagtggatcaagttaagggctttgaccctaaaacaattgaagtaactaataaggtacttcagctggtcgaacctctgcttcagattaagttcaatgactttcagtatcttgctttagcagatcacattgattttgcagttacgcgaattaaagatcatattgatatagctcccgctaacaatagttgggaagttcaaaatctttttccaaaagaatttgcggcagctaaaaaagtggtcaatctaattaatcaggagatgcagattaaattgccgcagagtgagtcggttttgatgacctatcacctggttaatgctaagagtgatgtttctcaagtacaagaaacaattcagattacaaatttgattcgtgggataatcgatattattcaattgcaatattcaatgcaacttgatacgagctcctttaactatagtaggtttgtttcgcatttgcgcattttgttagttagatttttacgaaataagcaaaaggaggaggcttcacttgatcctgcaatgctaggttttatgaaaatcaaatatagcaaagcgtatgagacggcggagcggatcaccacttacttacatgcaaaaatgggatgggatttagattcagatgatgaattttatcttgttttacatatttggcgcgtaactagtcgtcaagataattaaatatctaagttacttaggtatgttactaagaagattaggcatgaacccgagttactgaaagacgttgaacatttatgttctttagtttttgagtagcttgggtttttattttaaggaggaaaggcaaatggctaagaactatgatgaattagccaagaccatcattcaaaatgttggtggcaaagataatgtgaccagtgttgttcactgtgcaactcgtttgcgttttaaattaaaggatgaaaaaaaggctaacgatgatgttttaaaagatacagatggtgttgtaactgttgttaaagctggtggtcagtatcaagtggtcattggtaatgaagttgctgatgtttacgatgctgttgtcaaagaaggcggctttaatggcggtggacaagttcctgatgatgacgttgaagataattctagctttgtggataaagccgttgctttgatttcaggcatttttacagatattctagctccacttagtgctggcggtattattaaaggcctagtagttttagtaggcgcaatgggatggctttctactaaatcgggtacttaccaaattctatatgcaattggtgatagtattttctacttcttaccagtattcttaggggtaactgcagcacgtagatttcacatgaatcaatttatcggattagcaattggtgcaaccttaacttatccaactatggttcaattagctgcaagtaagactgttctaggtacattgtttaaaggaacggcttttgcctcagagattcacacgactttctttggcattccggttatcacgatgaattatacttctacagttttaccagtattatttaccgtttggtttgcttcaattattgagcactgggctaaaaagtggattccatcagttgtgcaaatgttcttggttccagttgtcactatgattattgctttaccagttgcatttatagtaattggtcctgtaatgacttgggttggggacgcaattggtgcagtgatgtcaggtgtttacaactttagtccaattattgctggtttattaatgggtgctctttggcaagtacttgttattttcggtgttcactggggaatcgttgccgtaactactgcagatttagccgcattaggttatgacccaattctaggtttatcctgcatggtttgttatgcgcaaattggtgttgttttagctattatccgtcaaactaaggacaaaaaacttaaagaaacagctactggtgcatttttctcaggactgttcggtgttactgaaccagcaatttatggtattacattaccaagaaaaacgccatttgttttaagctgtattgctggtgcagtctcaggtgcaatcattggtgcctttcattcagtattgtacattatgccatcaatgggattctttgcaattccggcctacattaatcctaagggaggatcaatgacaacaattgtcggcgtaattattgccggtattgtagcatttatagctggttttgcacttcaaatgctctttggtaaaaaatcagttgatgctgaatataataaaaaacaagcacaaaaagttgctgacgccgctaatgaagcagctaatattactaagagtgctcctgtacaagcaattttaagtgaagaaaaggaaaatccttcaaccaaattagtttcaccattagacggtgaagtaaaaccattgtcagaaattaaagatgaagtattctcaagcggtgcaatgggggaaggcgttgctattgaaccaagcgaaggtgtgcttcatgccccagctgatggtaagattgctttagttttcccaacaggacacgctgtcggacttaacactacagatggcgcagaagtgttaatgcacattggaatggataccgttaatctgcaaggtaagggcttcaagactttagtagaaaaaggtcaagaggttaaagcaggtgatccattggttaaatttaatattaaagaaattaaggctgctggctatgaagtgactactccagttgttgttacgaattctaagaaatatgaatctgtacagcaagtagctcaaggtgaagttaaagttggtcaagaaattttgtctttgcaaggcagtaacgcagaagttaaaacaactggtcaagttcaaaccaattagtctataattaatgtaaatgctttcagaaaaggagaatcataatgtcatttccaaagaactttttatggggcggagcaactgccgctaaccaaatcgaaggtgcatatgatgaagatggtaaaggcctatcagtaacagatattactactgcaggtagcttagatgcacctagaatgttgacttacaagttaaatggtaagttagaaaaaacaccaggagttccaggtgcgggacttcctgaaggggcagttggtgcaattgatcctaatgaatattatcctaaccatgtagcgattgatttttatcaccattacaaagatgatattaagatgtttgcggacatgggtttcaaaaccttccgtttatcaattgcttggactcggatcttccctaagggtgatgaggaaaagccaaatcaagctggacttgacttttatcgcagagtatttgaagaatgtaaaaaatatgatattgaacctttagttactatttctcactatgaagatccactttacctcagtgaaaaatatcatgactggcaagatcgtaaaatgatcgatatgtatgtgaaatatgctaagactttgtttgaagaatacaagggattagttaagtactggcttacttttaacgaaatcaattcaaccctgttgatgcttagtgcttttggcaataatgtgactgatgataaggcataccaacatgcatatcagaaattgcactatcaattcgtagctagtgctcgggcagttaagttggctcatgaaattgatcctgattatgtggtagggaatatgatttgtggaatcgttgattacccattaaccccagatccaaaggatattttgactaaccgccatatgtgggaacaaaatattttctactgtggggatgcacaatgcaagggtaagtatccaacatttgctaagcgtctttggaaagaacacaatgttcacttagacattactgagcaagataagaaggatatgttggaaggtaaagttgatatgtacaccttttcttactacatgagcaacgttatcacaactcatgaagtaaaagataaggttggcggtaacttcgccgctggtgctaagaatccataccttaagtattcagaatggggttgggcaactgatccagatggcttgcaatactaccttgaagttatgtatgaccgttacgaaatcccaatgatggtagttgaaaatggtctaggtgccgttgataagattagtgatgatggtaagattcatgacgattaccgcattgattaccttagaatgcacattaaggcaatgaatcgtgcgatcgaagatggcgttgatgtccgtgcctacactacttggggctgtattgatgaagtatcagctggtaccggtcaaatgtctaagcgttacggttttatctatgttgatcgtgatgatgaaggtaaaggtactcttaagagaatgcctaaggattcattttactggtacaagaaggtaattgaatctcacggtgaagatttagattaataacaaaaaatgatggcgtaagccatcattttttgtataggcaatattttacttaaaatgtcaatataccatataaaattcaaaagtgtataattaattctatattattttatataggagttgacattttgaatagaaaacgcaaaaaagtatggtggataatagggatagtcgccacagttttaatcgttttaattggagcagttgaagcatatttctttaatgttgcttttgttccaggtgaaaagacagtgctgaataaatattctagcaagaaaaagaaagattcacttgcgcagaataaaaagtggtataaaaacgctaaaaaagagcattggtatattaagtctgcttcttcaaactaccgcttagatgcaaattatattccaaataagcattctgaaaagactgctgtgttgctgcatggatttggtaataataaaaataccatggcaccctatgcggcgatgtttcatcaattgggatataatgttttgattcctgatgcgcgtgctcatggacaaagtcaagggaagtatattggctatggttggcctgaaaaatatgacgttagaaaatgggtcaataaagatttatcaattgaaggaagaaaacaacagattgtaatttttggcgtcagtatgggcggagcaacaacaatgatgactagtggcctcaagatgcctaagcaagttaaggcatatattgaagactgtgggtatagtgatgtgaaagctgaattcatgcatgaagcaaaagatttatacggtatgccgcaagcagtagctacaagtgcagttacgctattaagcggtgtaagtaaagcaaatcttggcttttatttaggggatgcatctgcagttaagcaattaaaaaagaatactaagccaatgctatttatccatggtggaaaagataattttgtgccaactaaaatggtgtatcaaaactatcatgctacaaatggtcctaaggagttatggattgccaaaagtgcagctcatgcgcgttcattcgaaacttatccgcatgaatataaaatgcgaataaacaaatttttaaataaatacatgtaaaaaaagacagaattaagcaatcaattctgtctttttgtaattacttcttaaatccataaaccgttggtaagtcttctagttttactccctgttgccagtaataaccttgctggaaaatatgtttattaccagcaaatttttgagcaatttccttatttctgatagcttctacaactagatctaagtgtttttccttagcaaagctagcccaagcatcaataaatttaatagtagtatcagaactaataggatcgaagtctagtaatgataatttgatcccactgattatatcagaatggtgatctacaaaagtaaagctatgaccaccagaatcaacatcgtctaaaacaacgtccaagccaatatcatggaatctttggaaagatttatcaaattgtttattacctaaggttccagcttgaagttgacgttcagttacttcaatgaccacttttttaccatacttactatacgcatggtgctagttaaatcgttttagttaataaaaaagtccaatcttgttagactcgacttgtaaatagtaataatagaaaagagtctgatctgattgaactgtcttaagcttaagcgttttagccaccatttacaagttagttttaaagatttagtgataatttgtcggcactggtatcgtttgtatgcaccggctgagtttactcatcggcgaaatattgatcaaattaaaactacggacagtctgattttggctttacttatctggcaagctaagacaggaattgaatcacaaagaagattctgtgaatgtttcaattgtttatcacactcacgttttaatcggcgttcacgtcagctattgcaattgatttatcagatacggcaagaaatgaataaaaaggttgacctgaatggacatttcttgatcattgacagctttccggtacctgtttgccaaccaattcgcaactatcgtgctaaaatttttcgcggttatgccaacattggttataaggccaccaagaaaatttacttctatggtttcaaagttcatgccattgttagcgatgacggttacattcttgattatgtcgtaacaaaagcatcagttcatgatgccaaggagacagttgaactgctggaaaatgcccatccatctaattactatcttcttggcgacgaaggctatttaggcaaagaactgcatcaacagctaaaacaaatgggttatgaactttggacaccatatcgtaaaaatatgacaggagctaaaaagcacaatgatcatcaattgatggctattcgcagaacaattgaaagcgacttttcgcttctgacctattacaatgccgagaacaatcgagcacgtagtctgataggctttcaaagccggttggaaattgcaattttagcttataatttggcttattgtctagaaagatttaactagcaccacgcgtacttactataaatattttcaataaatttccaaacgcttgggtatgcgaattgaataggctcaatgtttaaattgatacagatatcagggtacttagcaaaagcttgatctattgactctttttcggctaaaatccatttttgattttcttcttcagttccaattactctgaagaaatcgttatttgggaaggaatcattttcatctcgtaataacatttcataatgtgaaattgttacatttaaatctttatcgacttgataaataggttgaaaaacgttataccacttactcattactattacctctgttacctaattgaaatctgataagttctcattggtgattcacttacagatatttcatctaaactacaattcaatttatttaattcttcgccgaaacgattgaatagataatcggttaaattttctaaagtaggatttactttggtgaatggctcaacttcatttaaaaattgattattaaacttttttataatttcagcaatcttattttcaatttcattgaaacgaatcaatttgccgttattaatatgaaagctataccttatttcataagtatgggaatgagcctgcccgattcctttactccaacgaatagcatgtgatgcgttcaaataagttgtgaatatataagtatgatatttagtcgtcataattttttcttttcaataattgtcttatatctttttttatgatttggttaacctgttgaccttcttgaattatattaattccttgccaagttgtagtggtggttgaagcattaataatcccaacacaacgaatgaaagaacaaagtaaattataaaaaagcagtaaaaaaatcatccaaatatttttaagataaaattttctttcttctggaaagcttcctaagtatatgtaaacacaaattgaactcgaaatctccaaaaataaatataaaagataaattaccgcataagaaaacaataatgatatccatgaatagccaaatcctaataatataaaaatagcaaacatccaaattatttttaggaaagtgactgtgtgatcaatgattaaacgacgaatttgaaaattactgaagaattgtttccaagataaaacttgcgataaatatttgttaatgacttctagttcaccgcgttgccagcgttgtcgctgagtatatagttcactgaagccgctaattggttcagaataaaaaattgcatcatcacaaaatgaaatcgttccctttaaattgtaccggatttggaaagtcatgtcagtatcttcactaattgtatcggtactgtaaagatacgttctaattaaggtctcgcgtttaaaagccgaaaaggcaccagaaagcgtgaaaatatgattgctgttattttcaatatttcttcctgctagaaaggtttggcaatattcaaaatattcatttaaaattgttccagttaaagcatcgatatttggattagccgagaattttttaacaatgttgtttaaagcatgtttatccaaccgaccgtcactatcgatattaatgatatattgggatcttgctttataaatggcagcatttaatgcagaagactttccatgaggagaagtaagccaccgcatcaataattgtggatagtccgtttgagctttagcaaagacttgaaaggtgtcatctttgctgccattatcgacaacgaaaattcctagtaaatttttgggataatctgaatcagctagcgatttaaggcatctataaagtgttttggatgaattataagtcggaataataattgataatactggcaaaaaatctggcagaggggtttttttgcgaattttatgatgatgaagaagccgaataaaattaattatcatcggaatttcttcaaatatgacaggaattaaaagccaagtagcccagaatcccatttgtaatactgtttgatcaaacatgattattcctttttaatctaatttgcttcgccctagtaagtttgagactaattgtgaatgagtgaagacttgataatatagaagaattgtaaagatatagaaaaagatacgtcctataacgtcgtgaacccagaacagggttcgcaaattaaggtaatgaacggttatcccaattaaacctaatcggcaaatattaataaagtagatccaaaaaacaccgataatgctaagagcaaccttttgacgacgagtgtaaataggaaagaaaattaataagcttaaatatgccaatgtttcaataattccagaacattcatagtcaactaatagggtaattgatccaaaagtagtttgaatgtctaaagcagctggaaacggataagcagtaaagctatgagtcagctgtccaatcacaccagctccgcggctcactaggctagctaggaaccagacaaaatatttgtggcatgcaaaagtagttaaaagaaaagcaccaatagcaccaacccaataataaaaagcaaataaatgtgcacgattagttactgaaagggcatataaccaaactataatcccgccaattaaatatccattaagcattattcatttccttagttttttaatcagtcaatatttttccgcggccattattttttactttgtaaactaaatcatctgcgcgttcaagagtgttataaaaatgttcattagataaatgcttcgtgaagccacatgaaaacgagaactttattttagttttattatcaggaagtttgataaaattatcgcggaaatattgttcaacattgtttagtgcagcgatgatttgttcaggattagcattaaaaatgacaattgaaaattcgtcaccgccaaagcggtaaacgaaacaattaggagcaaaagctttatcaatctcgtgtttcagttttttagaaaaagtatgcagaacaatattaccatttaagtgaccataggtatcattgattactttaaaatgatcgatatcaatagcgccaatataggtattagttatattaggtcttttagataaatttttcatttcttggtcaaaagcgcgaaagttaagaagaccagttaattcatcacgcttgctttcgtaatgcaatttagcaattgcttcttcatgtcgactttcaaaataataacgccagctttcaccaatgatggtgaaagtagttccgattgtcaaagcgattaaaaatgtgaggtgtaattcattttctatataaagacgtacaaaatggatgagactccctgaataaagggcaatgatatacttaacttgatatgaaagattttgacaatgatttagaataaagcagattaatgcgatggatgaaatctgcaataaagtagcggggatatttataaatgaatatctctttaaatcaagaccaataagtaacggaattagtggtgtgataaaaagcaaaaaccaccaaatatgttgcttgttgcgtaataccataattgttggaatgacatacatataagcaattgctttaaaggtaaagatggttacatttgcaatacaaacagtttggagtatgtaaaaagtagtaaaacacaatatgataaataaatggtgacgccagtcttctagctgtttctcccatactttttctatttgtgtttgagttacaaccatgctaattgtaatgattggtaaagagatagtagggtaaattaaactaagattcatatttaaaaacctcttttcggtagaattgctgtcaaaattttatctaaattatatttagcagtgtctgctgaaagtgctgttaaaatcaagataataggtaagaattgaactagataacgactacgtccgccttcaaaaagaagtaagaatataaaaccgccaactagtgccattcttagcgtttgaataataaagccgcctttttgaaaactgaatagcaatacaaaaataataattgtccaaagaatttgagcgataaatctaaactcaataacatattttccatttggatagataaattccgctaagaatcctcgccagccttctgatggctgcttggaaataataaaatggccttcatgcagccagccgaatgtaccatctgcagtatttagaccttgctttttaactagaaattgtaaataacccaatggaccgcgttttttaagacgcttgatgatcatctttttagaatagacaactttttgtttcttagtaggaagctcatccatttttaaagctgcttttggatcataggcaccatcatgtgttaaaccaacgttgatgaagtggatcatcggaatttggcgtttttgattaacgatgatgtaatgctgatcttgaaccgcttttttaagaggttgataggctaaaacaaaacttgctgcaatagttaaacagaaaatagaagttagaattactttgttgttttttaaaatatagagtaaactcgttaaaatcgcggcaataccccaaacagcaactgaaggcttgatccaaacgccacatgctaagctaattccggataaaattgctcctaaaaaacgaatgacaactagatatgatttttgggtagcgatgctccagccaaaaattgaaagtgaaatagggagcaagcaccatacatctgtgtaaggaaccatgcaaatagggaatatgctaagcagactagctagaatataaatgatattgggaattttttgaaaattgattatcgcaattgtagcgatgattactaaaacacttaaatctgtaacaagtgttgaacataaagccattgttaaccaactggttgaatgaaagatattggcaacttgtcttagagtaaggaggatggataggttgttgtagttaacactgaaatatcctcttaattcaggtagattcggattgattatggtattgtgaacagcactaacatcaaatccgattgcgggatgtacgaagtagacaaattgaatttgccaaattaatgcaaggactaaacaaataatagaagtaatccatttatgcttgataaaaattgtttttaagaacatttgaaactttggaaaggagaaccagcttaaaactaaaattaatagtagtgcaaacattatgtaagttaagccggtcgtagtttttgcatctggcagccaattagtagatgagagcacagcgaagaagctaattataatcaagccaaagaaaaaggcacggatgacaccatttccaaaatgaaatatttttggggatattttactgatgttcatgacgtactaactttcttttatggtaataactaattgcggctattgaagctaagacaaaagcgatgatggcagggatgtatgggccggtgctggctccgctgattgtgatttttgtgttgccacccaaattaggattttgcattgtcattttagttgatccgtttaggtcatctctgttaaacatattgtaaggaatcttaattatggccgattggcggccatcactatctgcataataatgacagagattatctttagttgctttatattgattagtttgaggatcccatactccaattcctgcatatccagattttccattttgaatattccatggattgacatctaaattaacactgtatgtagcattaccaacatttatattgtaggctgatggctgcaattgacgatatccaccttcatatccatgactatttctattggttttagaatcagggcaaatgtctacatataacaacaattgattatttttaggatcattaataaatcctatttgatggtatgtaaattgatctgttgtccagtcctcagtaggatagccattttctttccattctgaagcgggactccatgatgcatacactttgctattaaaggatatacaaaaagctaagcattccaaggctagcagaaatactataatcttctttcttatatttttcattttattcagtctcagtttaaataattctataaatatataccttatctccattatactttagtataacacttagtgctaaccttgttgagtatataaaattacaaaataattgtaaattactatatgattatagaatatagagtgaaagtgatatcaatttgagcaaaaaagaagctcgtaaagcatgccataattaatgacattatttgcgagcttttttgtaatttagtttttatatggttgcttgttggggttttcttcgtccaacaatccaagtaatgattaatgcagcgatagcttcaactataatcattgtgattcttgctggaatcttggtactaccaagccatacgtcaagaataatagaaccgataatgataattcccatccaaatccattgagatttgtcaaaagcaataccgtattcttcttcacgacgtctaattccaggtaaaattgcacccaaaccaattaagacaattacggctacaatattaatgatcaattcgtaccaccaaaggccactgccttgcttaacatcttgtggtgcaaaaccaaggatggttgctacggcagtaacaactaacaaggcaagaccaacaagccaagcaagtttatcgtttttaatgtagacatattttgatgggtacttctttgagttctttcttactctcatgaatgagtagaagatccagcaggtaacacctggtgaaatgattgagttcaagttaagcaaccagttgaagatatcgttcatgtcaggtaagaagatacctaagatcatgatgaatgatgaaagggcaacagttaagatgtaaccgttaattggtaagccgtttttgtccttcttacgtaagaacttaggcatgtacttatcgccagtgtcggagataagcattctagtcatggcatcaagcaatacggcaaccaaggcacagttgaacaataatgatgtccaagcccagaggtaaagcaagaatttacccataccgaattgtttaccaaccatgtcgaatacgtagtaagcaccgttcatcttcaagtcgtttggaatgtggtatgcgtcaaagtagataccaagtgcaaatgaaccaaggatagttaagaaagcagtcatgatagctaaagtaatcattgccttagggaagtctgacttaggtttcttcatcttagttacatatggtgcaaccagttcacacccattcatggcatagattaacattccgacggttgaccagtagtgcaagtcgaatttaggaatgattgtgtgccaagtaaatggttgggtagccatgtgaccgcctgattttgccaaaccaacaaaggcaaggaaaacaaacaagacagtcataatgaccatcaaaccaccaccaatactggaaaggaattccattgagttggcaaagtggtgttcaacgataatgaaaacaatgaacacaacgaaagtcaaagcagcaaacatggtagtaggaattttatcttggaatccctttgaaccggtcaatgcccaacctaggtcgacaatgatttcgttagcggagtctacagcataaggaattgaggctgcccagtatgtccaagcagtgaagtaacctaaaaattctccgtcagtaccgcggacccatgatgaaagtccgccaccttcttcactaaacgtagaacctaattgtcctaccattaatgagtaaggtgttacataaagcaaacacatgataatccaagaggtgataactggcatcccttggttttggaagttgtacatgatatcgtccaagccgataacagtacaaagtgccatcaaggtcaaaacaggccaagtgatggctttcattttatttgttgatgttaaatcgtccaattaattctcatccttctctatttaaaaataattactccctaaaaagataagaatcctggcgacttatttttacatttttcgttcattctattcctttcttagatgaaagtattcaaataaattttacctattaaaaagaactgtgactgatacaatcccactaaagtggacgatttaaatacataaagtattcaattatccatggaggtgggattttttatgtccagaaaaagtaaatattcattcgatcaaaagatatgggcagttgaacaatacttgaatggtaataggagcagcgttgaaatagctaaacggcttaagatgccaagtaaaagtggagcgatgcaagtaagaagatgggttcatcaatatcaaagcaatcgtgatacccttctaagtaatgctcaatacaataatcattactctaaggcatttaaagaaaaggttgttcaagaatatttagctggcaaaatgtcgttaccttctttagctaataaatatggcattagaagcaatggaacagtatcagaatgggtttccaagtataatagtcatatagaaaatcgggactatgatccccatccggaggtctatatgactaaagcaagaagaaaaactacccagcaagaaagaattcagattgttcaatactgtcttaatcacgacaagaattacactcaaacagctgtcaaatttgattgttcttaccagcaggtttacagctggacacacaaatatctagctaatggtgaaacaggattaacagataaacgaggcagacataagaagccagaagagctaactgagttagaactggctaatcgaaaaattaaggaattagagcgtcagctcaaagaagaacaaactaagaacgaattcctaaaaaaattagatcagttagaaaggatgtgcttgccggacaaccaagatacagacaagccgcaataaaaagacgctggaaacaagaaacatatcagttaatccatgactgccatcaaaagtacaattggaagattgatttaatgtgcaaatgggctaaaatagcacgctcagcttattacaaatactttgatcctaagcgcaagccgagtaagcgtgaagaacgagacaaaaagattgaagcaaagatcattgaaataactaagtctaacaacagtctgtttgggacggaaaagatgaccatggcagttaatcgacagatgtctgatgaaaagccggtttatcataaaactgtttaccgcttgatgtgtatcaatggcattagatcacaaaagcctagataccagaagctaaagttcaagcatacaacgcctgagaaaacggccgaaaacaagttaaaaagagactttaatgcatctagacctaatgaaaaatggtgtacagatatcactgaagtcgttgctgctaacctgcctaaggcatatctatgtactgtgtttgatctatatgatcgctatcctgttggctacgcaattagtaaacgaaacgatactgctttagttcaagcagcctataagcaggctgttaaagcataccctaatgctcatccgcttttccatagtgatcgtggttttcaatttactcgcgcacctttccaaaaccaattagaagaccaaggcatgacgcaatcaatgtctcgtgttggctgctgtattgataatggtccaatggaaggctggcaaggcattatcaaagaaatgcgagttattcttcatcctcaagtggccagttatgatgaacttaatgattctatttgtaagacaatagattactacattaatgaagatccacagaaacgttttaacggtttaactgctggtgaaatgcgcaaagaagcgatgaaaggcaatattaagaattgccctattgcaccaaatcatcgaattgagaaatactggcaaaaaatacacgaaaagaaaataagagaagccaaaaaatcctcagctgattattaatcaactgaggaataaaagctttatgtaattctactgtctacttgacagggaatgtatcagactagtgtaaaacgctttctatttacaatcaaatctctttacttattataggtaagcatgtataatacaccaacaaaaagtaagagtcaaaaagaaaggtggggatgttaatgactggacaagtattggcaattggaattattattttggcgttgggactattaactagcaaaagaaagccagcgcctcaaagaataaatagacgcagataagaggtatttatggcaaaaacatcacaaattattcgtaacaaaaaagaaacaaaattttcaactagacaatacacgcgctgtgaacgttgcggccgaccgcattcagtttatcggaagtttggcttatgccgagaatgtatgcgtgaattagctcataagggtcaacttccaggtgttaagaaggctagctggtagaaaggaaaaacaatgaaagtttttgtagctggtgctacaggcagagtgagcaaagaagtaatcaaaagattgatagatgaaggctatgaagtaattgcaggtgcaagaagagaaaatactgttgaaattatttctcctaatatgcgggtgcaacatttggattttcatgattcgcttaataagctgaccgaagaattaggtcacccagatgcagtgatttttgtagcaggttctcgtggaaaggacttattgcaaactgacttaaatggcgcagttaagctgatgaaggctgctgaagctaatggcgttaagcgttacgttcaactaagctccgcctttgcgcttgaccaagacaagtgggcagaaattccttctcttgcaagcattattgattatgatattgctaagtacttttctgatgaatggttaattcataatactaatttggattatacgatcattcaaccaggtaacttaatggagaagccagcaacgggtaagacatcatttactccagaaggtggagaaaattcgattgatgatgttgctcaggtattggttgatagcctaaagtatgataatacgattcatcaagtaattattatgcatgatggggacacaccaattgatgaagcattaagcaaagttaaataatttataaaacgggtcaagtttaacccgttttttgttaaagtaagaagtaaaaaagagagaagaaatagcaatggataaatttcattttactaaacgagaaaaaatctttttactgcttgctttattggtgctagttgcattgttcatttctagttcaatgacttatcaacagcaggaaattcatgacaataaaattaaccgttattttggctggttagagaatatcgttgctggctgggattttacttacggtggtcgtattcacaatgtgcaagttgatggtcgagcagggctggcccaatttgttttacgtaaaatggctcactttggttcttattttttactaggtggttttggctatttaggattaagaagaattttcaaaatcaaatgggtagcaccagttttaacttggtttatggcaattgcatttgctgtatttgatgaatatcatcaatttttaacaggtgatagaacaccgagcgtgcatgatgtaatgcttgatggagcaggagcattaacggcaattttgctgataatgctagtattgtttattaaacacagattttttgaccagaaaaaacaagtttaaatggttgacaccattgaattttgaggtgctgtgagttaagataatatcgttaattaatattagaaaaaagaaagaaggatccttatgtcaggacattcaaaatggcacaatattcaaggccgcaagaatgcgcaagacgcaaagagaggtaaaattttccaaaagttatctcgtgaaatttatatggctgcaaagagtggtggtcctgatcctgatgggaatcctacattacgtatggtaattgataaggcacgttcaaacaacatgcctaaggataacatcaagcgtgccatcaagaaggccgaaggtggttcagaagaacactacgacgaaattacttacgaaggttatgctccaggtggtgttgcagtctttgttgaagctttgactgataacaagaaccgtacagcttcggacgttcgtgttgctttcactcgtaacggtggttcacttggtgctactggttcagttgcttacatgtttgaccgtaaaggctacattgtaattgatcgttcaactactgatgctgatgaagatcaagtattacttgatgttatggatgctggtggtgacgatcttcaaactagtgatgatgcatacgaaatctacactgatccaaagcaatttgcaggtgtacgtgacgccttaattaaggatggttacaaactagcagatgctgaattaactatgattccacaaaacaccactccagttccagcagataagaaggaacaatttgaacatttagttgatgctcttgaagatagtgacgatgttcaaaatgtttatactgcagcggctgatgaagattaattagttaatgatgaaatagcttagccaatggctaagctattttttttgtgtacttttttaatgtttttttaatcttgaaatgctgttagatcaacgttttttagagttgagaaaattttttgtgtttttttaaatttctcacaaaaaaatcgattttttttgcgtaataaataatgtgaggcaaaaaaggaggatttttatgaagatcaaagaaattgtcagtgaattattgattgaggcaattaaagttaaagcaagtgatattttctttttcccgaaaaaagaaaacttgatggttaaatttcggaccggtaagggtctaattgaatatgcaggttttactttggagacgggaaaggaaattatcaatttttttaagtacagtgctcagatggatattgcagaacatcgtcgcccgcaggttggcgcaatgacatatgagaatgaaggacatgaatatttcttgcgtttatctagcttaggagatttttccgatcaagagtcactggttattcgagtcatctatgggattgaccatagtcaatattttattccagagcagctgggaacaattgaaaagctggctaagagtcgcggattgattattactagtggtccaactggctcgggcaagacaacgacaatgtatgaaattgctaagaaaatgagccaaaacaaagtagtgatgacaatcgaggatcctgttgaaattcatgagtcttcttttttgcaagcacaagtcaataacgaagcgggaattgattaccaaaacctgttaaaggcggcattacggcatcgtccagatattttaattattggagaaattcgtgatcaaggaacagcacgtttagcagttgatgcagctttaagtggacacctggtttttgcgacagttcatgctaaaagtactttgcaaactatttctcgactagagggattaggtattaggtgtgacgaactgacaaattgtctaactgcagtgtcgtatcagcgattattagtcagtcaaggaaaattaaagtgcttgatggatattgcagcagattctttgctaaaaaaagagctaggcaaatcggttcgtggtgaattcgttaattggcaggaaaatctagagcgtttgtggaaaggaggagaaattaatcatgaagtatattggcaattccaaaaaggataagttaaatggcgaagaacaattggcctttttggattatttaaaacatagtttagataatggtttttctttgctcaattcaattgaattaatgccggcattgtggccaaaaaggtgtcagttgatggaaagaatggctagtcgcatgaaagaaggagcaagttttagtactgaactgcttaaactaggcttttctaaaacgacagtaactcaggttaatttggctttacagcaaggaaacctagttgaatgtttgcagcatttagcaacgttgaatcgactaaaacaggagcagatgaaaaaactgcgggctgaattatcttatccgttggttttagcgataatgatggtgattttactggtctttatgcaatcgtttatttcgacacaattcagcgatagcagtgatcattcaggagatatggtcatgattggtctgatcattattgtattgctgggcttatatttttttgctaagatcgttactttgctcaataaacaggattattcatcaatgaaaaaactgagtaaatatccgttaattgggcaggtagttatgctgtatattcattatttgttggtttatgacattggactgctgctagctagtggcttttcattgcagcgaatgtgcgaatatgcggcagatcaagagaaaggttcattgcagcaagcactgggacaaaagatagggcacgatttagctgaaggaaaaaatttagaagaaattattaatgcagaggattttttgcctaatagtttattagttttattgcagactggctctgagcgaaagagcttgagtaagcgctgtttgttattaggacgtagcctatttttggatttaactgaaaaaattgagaaattagtcgtcaatgttcaaccagcttgttttattttaattggcttatgcattattggaatgtatttgaagctgttattaccaatgtattcaatgatgcaaggactatagaaaaagtgacattaaagataaaagtaaaaaaatagagtgaagaagaggattaagttaaaaatgaaagagaagatgaagaagtatttagcaaacattatggctaagcgccgcaagcaagagggttttactttgattgaaatggttgtggtaattgccattatcgtgattttgattttgctaattgtgcctaatttgattaatcaaaagaagaatgctgaaactaaaactgcggatgcatttaggactactgtgcaaacgcaagttgagttatataaggataaatatggtgaacctaaagattttgaagatctaaaaaaggacgattacttaactggtgatcaaattactaaagctaaaaagaatttcacgttagatagtggcgaagtcgttgaaaagaaataaattagccggcttttccctactagaagtaataattacacttggtgtttgctgtggcattttgttgattggtagtttgcagttaaaaagatatcaagaaaaactgatttttgataatactgttaaaagagttacgacggcacttgatcaaacttcgaggtacagtacgatcaaggaggttactatttgcgtatcatatctagctaaatccaatcaaattttattctctggcggaaaatatcacaaaagtattccagttgatcaaaatatcaaaattactggcttggatcattttaaattcaacctgactggttattctaaaccaggtacggtgacttttagtggctacggaatggaaaaaagcctgaaatatcaaatgctgtgggggagagtagcggaatgataaaagttaaaggatttctagtaattgagagctttatagcaattataattgctgtgattgctgttagttgcttttatataactgtagctgaaaatcagaaaaatggtcgtgagatggaattaaaaacagatcgtgcttatgcttaccatatactgactaaaactgacctggagcaagtaacagttcacgatcgaatttatcaaaaggcaggacgtaatcatgtttgggatgcaacgactaaacaaacttttgcggtcaaagagtaaaggttttatgttagctgaagcaatgttttcgctttttattactatgatggtgctgctaattttacaaaatttattgttgagtgttaaaaaagcaaacttgaatcaaaatcagcatgtcaatgaagtagcctatgcttatgtacagctagaaaattttatgcgggctgacaaaattaaggcagtgtatccagtaactaaattagctataagtaatagtgcttcctttaagtgcatcgatcaaaaaggcgatgcaactacttaccgaattgaatactataaaaagaacgtacttaaagtatctggtgcagggaaaggctatatgccgttattatttaacgttgaaaaggctgcttttaaaaccactaaagatagcatcattattagggtaacagagaaaaataagggtgcatcagatttagtttttcagcttgatgaggaacaggaaaagaaaaatgctaaaaccaaagaaaaagacgcataacgtaaaaggcagtgccttactaagtagtgtattagttttaatgaccacgcttttgtttatcaaaatgtatcaagatatttatcatgctagcatggagaacaatcgcctaattatcgaatgcttaacggatgattgactttccttgcacctctttatccctttctataaaataattaaggtatggagggaccgctatggaaaatttggaaaaactttttaatcagtttttagactgtgtgcaaactttgcaaacggcattaaatgtttcatttacagaagccttagtagagacttttgataacttagaaagtggcaagattaaggttgaaaatggtgcaccggatgaaaaaacagtggctgaattaagtcaaaagtatcaagcaatagattatgacgaaattagccaaaaagaaaaggctcaagtctttacttttctaactttaaaggcagttaatgatgatggctttgatgttaaccaaatgcctactccacctgcaattgctacagtagtagcaatgttgatgcataaattattaaaagatcaaaagatggaaatcgttgatcctgccgtgggtacagggaatttgttgttttcaattatttctcaacttaaggcactcaatcattctaaggataattatcaattggtagggattgataacgatgaagatatgttaagtttgacagatgtggctgcgcatctgaataatattgacattgagttatatcatcaagacgctttaatgccttggatgtgtcctaacgctgatgcaattgtaagtgatttacctgtaggctattatccagttgatgagaatgccaagaattttgaaaatcaggctaagaaaggtcattcttttgctcatttgttgttaatcgaacaaattattaataatttaaagcctaacggctatgcctttttggtagttcctaagtctattttgtcaggcaagattggcgctgattttatgccatggttaactaagaaagtctatttgaaggcgattgtagagttgccagatgatatgtttaagaacaagtttaatccaaagtcagttttagttttccaaaatcacggtgatgaggccaaagcaagtgaagttttgcttaccaaacttggttccttgaaaaaagaagagactttaattcaatttaatgttaaacttaacgagtggtatgcaaagattaatcattaattgataaagcacttatttttttgaaagaagaggaattaatttttatgaaaaaagttttggcaattaactctggtagttcatcttttaagtacaaattattctcattaccagatgaaaaggttcttgccaaaggaatggctgatcgtgtaggtcttgaagattcatcatttgagattaagttagctgatggtactaagcacgttgaaaaaactgaaatcccagatcaagaagctgcagttagcttattgatcaagtttttaaaaggataccatgttgttgaagaactaactgaaattgtcggtgtaggacatcgtgttgttaatggtggagagtactttaaggattctactattattactaaggaaaatctgcctaagatctacgaattgtcagattatgctccgcttcacaatcctgctgaggctcgcggaattgaagcttttatgaatgttttaccaaatgtgccagaagttgcggtttttgatactacttatcaccgtaatcttgatccagtacattatttgtattcacttccttatgaatattatgaaaaatatggtgtacgtaaatatggtgctcatggtacttcaattcgctatacagcaccgcgtgctgctaaattactaggtaaagatttaaaagacttaaagttagtcatctgtcacttgggatcaggcgcatcaattactgcagttaaggatggcaagtcttacgatacctcaatgggctttagtccaattgccggaattacaatggctactagaaccggtgatatcgatccttcactcgtgcaacatctaatgaaggtagagcataagtcgatggatgaaatgatttatatcatgaataataagtctggtttgttgggcttgtcaggaatttcaccagatatgcgcgatgtgcgtgaaagtgatagcgaacgggctaagttagcaagaaaaattttcattaatcgtattattcgctacgttggtgcttatattgccgaaatgggcggcgttgatgcaattatctttactgctggtattggtgaacatgatactggtgtgagaaaagcggttcttgacgctttcgcatatatgggtgttgttgtagataatgaagctaatgaaagtgttagtgaaggactaatcacaaaaacagattccaaagttgcaggaatggttatcccaactaatgaagaattgatgattgaacgtgatgtggtacgtttgactaatattgattaagcatttttatcgcatgtaatgtgtgtctatgctataatgaataagtatctcaaggggatgttttgggattcgacaggcgtagacccgcattgactgcggttcgtaggttacgactacgtaaaaacgttacagttaaatataactgcaaataacaaaaattcttacgcattagctgcttaatttaagcgcatgtgttgctccttgtcggtttactcgtggctgacaccgagtatcaactttagcgagttacgtttaactacctcacctgaatagttaaaaagagtcttaacaggttagctagcccattctagccctgttatatggcgttttgagctagtgaagttcaagtaatataactatgatcgtagaggtcagtgacgagatgcgtttggacaggggttcaattcccctcatctccatagataaccgttctagatgttgttctagagcggtttttgttttgcagaggtatctaaaaggtatccatttaattaaatttgatctaaaatgtttactatttgttgatcagattgttgttttaattcgtctagcatataagcgtaagtattagctgtaatactcatgtttgaatgtcctagtcgtttacttatcgagtataagtcaactcccttaaatagtaacattgctacatgagtatgcctcaaactgtgaaaatgaaaaccatcttttttaatcttattttttgccagttgttttctaagaactttgtttacagcatttgatgaaggaatagttccatcctttccgatgaatagtcgttcatgatgattaacctttagttgatctaaaatattcaataaattttgatctaccttgatgattctagtagatgacttatttttcgtttctttatttatgtcgtcagaatcataattgattattttattattatcatagtcccacgatttagagatactaatagtgtgattcttgaagtcgatatcatgccatgttaacaccttaatttcacctggacgcattccagtataaattattgttagtagcatataacgactgatataagagggagtaatatcttttaaaagtgatttttttagtttttgaacctctttaaagtttaaatattcaatttttcttgaacgttcctcattccatgtaagattaatgcgctcagtaaaattaattttaactaatccttcactcattgcgtcttttacacaagttcgtattgttccgttagtcttatagaccgtatctttaacatgcttttttccatacgaattcataaaatgttggtaagagcggcgagtaatttttgaaattctggttttaccaaaattctgttgtagtaatacataaatgtgcttatatctattttgagtgttgtttgatttgccaggaattttataggtctcgtaccagtccttaaaataatcagcaaaaatggggtcttgattagatatttgattggcgtcttttgcaacttccatttcattagcccattttctggctgcagatttggttaaaaacccctgttttactttaaaacaacgcttaccttgctcatcataccaagatacttgtgcccgccatttagtgcctcttttttcaaaatgcgccatcttatttacctcttaaatttaaattattcatatgttatttatgcattacgtataagttacttatatgctgcttatataaattgccccgtctactatagtgaagtaggcgggtatttttgatagttagtaatatttagtttggtcatagactcattcttcaaatttatatttacttagttcttcttgtacttgaaagtaatcctttgtcccgatactttgggcaaaatttagccaattagcggtttgaagatcattacctaacgcaaagtattgtttgactctttcatgtattaaaaaggaattagcactatgttcactacaagtgtgtgcgcagtcgtcgctttgataatcaccttgcacatccttgtcgtacatcatatgtcccagttcatgtagaattacatttttagcttgctcatcatcatagcttgagttaactatcatcacatcaggcttattatctttaccatgaacaagcaaacctgggcagtgtagaggagcaaattctaatcttatgtgtgattccttaagtatttttttaagttcagtgtccataatgcacaccttttcctatttttcattgtaaattctctttagaatatctctgactaattctttatcgtggtcgtccattggtttgccatcgaagaatctagcattattaatcatttcacttagatcggtgtcatttgctgaaccagatgtttttcttccgagtaactcatcagtacttacttgaaaatagtcagctaatatttttaatgtatctgatccaggaattgctcgacctgtttcccaagatccaatagtttgttgagaaacatgtaaaatttcacctaattctgcttgatttaaattcttttgctttctaagtgttttgatattatttgctaatttctttctatcataatctttcattttctaggctccttaactattaatttacatttatattactactaatactaataaaaatagtgaattactactaaaaatagttttaatttgatttctatcttgaaatactaattaaaatagtataatatataaatgtagttaaggggaggtattaaatgttaactaagcttaaaattttaagagttgaaaaaggcatgagtcaatcagatctcgcacaagctttaggtacaacgcaagttacggtgtcagcatgggaaacaggtagatctactccaagaccacctatgatgcaaaaaattgctgattattttggagttagcaaagatgatattttttttagagcttttaactactcaaaatagtaatatgctgagcaatcaagtgcttaaccaataagaatagtaaagggaggataacagatggaaaatgaatttaaaggatctaaagcatttctgatgattccaccatcaatttcacgagatgaagatttattaagaaaacctaaatcgatacttttaatgggtgaaattatctcaatgcttaatgtcactggcgagttttttatgagtaaccaaaaaatcgcagaacatttaaaagtatcaggtcgtcaggttaatagatatttggatttgcttgaaaagaaaaaattaattgagcgtgaaaaagttgttagtgataaaaatggtgcaattttaggaagaaaaattcatgctggttcagcccttatgacatgcatgtcactagggtggggaactgagcgtcacaagggtagtgacaccaatgtcacacccccagtgtcacccatgtcacataaatataacagagttaatagatcatctaatagaacagttaataattcttcttctaggaagaaagaagaagatccagaaagagaaaaaatctacaaagaatttttctttattgcaagaatgaacgataagctaaaaaatcactctactaatccaacacttgatgagcttaaacagttacgaggtttgctatatcaatgcaacgtagatactttgcaagcagttaaggataaattcaaggagagaatgacatgggacatggtaggtaaaccatatagctatttgttaaagatgctgagagatggcttagcaaatgatagaaattatgaaagctggggatagcaatgactcgaaaacaaataacgctccgcatgtctaatgacctgtatgaaggtcttagacgattagcagagcgtaaacaaattagcattaataatttaattgttaatgtgctatggaaacaaattaagcattaatttttccatttttcttttcaaattgctgaacgtgtttgatgattaattgctcaatttctttattagcagaacgtccgttgtatgaagctatatatttaagctttttcatcaatgctgggtctactctcaaaccaaacataggtaatttagaagccaatttatgcacctccaatagtgttatcaatttgattacattttaacatcaaagaaacatataaaatgtccattgacaacaaagtgataacactttaatataattacaagaggtgataacactatgacaacaccaaagaaaacgacaggcgtaagagtgcctatttatttggacgaagaattaaccaagttagcttcttatcgtggcataacgaaaaatagtttgatcgtgaccgcattatgggagtacttaaagaaagaaaaaggcaataacaatgactaagaaaagaaagactagtgaagcaaatcataaatttaaaggtgtttggatacctgctgagtattggctagataaagatctaactatcatggaggttgccttgattactgaaattgacagtcttgatggagaaaatggatgttttgctagtaataagctttttgctgatttcttgggaattacaccaggacgtgtatcacaattagtcaaaagcttaaaagaaaaaggctacatcaccactatgtattcaacaaagaataacgttacgcaacgaactataagggtagttagtaaattaaatacccccgttaaaaaactaaataggggtattaagaatactaaaggggtatttaataaattatcaactagtaatatatctagtaatacatttaatagtaatacagttagtaattcttcttctgcgaagaaagaagaagatccagaaagagaaaaaatctataaagagttttttaccattgcaaggatgaacgataagctaaaaaatcattctaccaatccaacacttgatgagcttaaacagttacgggggctgttatatcaatgcaacgtagatactttgcaagcagttaaggataaattcaaggaaagaatgtcatgggacatggtaggcaaaccatatagctatttgttaaagatgctgagagatggcttagcaaatgatagaaattatgaaagctggggatagcaatgcaagaagatatgtctgacacattaatcaaccttccaagccttacgaatctaattaaaagtattgtaaaagaatctgttagtgcagataagcaagacttaactggcaagacttggaatatcgatgagtttagaaaatactgttgtcgtggcaaaggtgataactgggtaagaacttttattttcgatgaatttccagaagttgattataaaaatgatggattcgtagtaaaccccagaaaaacgccagctggtaaaactacaattatttttgctaaagaagcttgtgagtggatgcaaaaacatcaacacgagattgactggaatgcaaaaattaccagctaagataaaatgcaaaaacatgtaaacaaataacgctccacaaagagctatagatttaatcagttgggagaaataaatggaattaacaggtaaaaaagaaaattttgaaaagtttatattcaaagtagatgagttaggttacgctattgacgacttgttgccttctaattggatgctgaatttgaaagagtcctcacgtttattaagcgacattttaagcgataatcaccttaaagttaagcaagaaactaaaacaacgtcagataatcttgcaattcaaattaaaacaatcctagaagattcagatttgcaagtatcaactagctcagtaaccatgctagattcaaatgatcaagtcgaatacatacttaactggtggcaatggagaattaactgccagctagcactaattagtggaatttcaagcatgtatgaatctatcgaaaactagttagcattttttagtacagatttaatcaaagaaacaattaaatctgtttgttgatcagttaaatcaggtggtaaagtacccaatattttggtctgttgcggtgttaactcaacttcttgagaagtgtttactagagaactagcgctgacgttaaataaatcagctaatttagccgtattttccttgctaggggtatttacccctgctagccatttatagactgtaatgggctttatattaagtctgctagcaacttcttgaacagataagttactagtttgaattaactgtttaagatagtcagttctgaattttaaatctgggttatcagatttttcagctaattgagacaagaaatctttagtgggctgatatgaaggatcaagttcatcgggtgcaacatgcaaggctttagcgatcttaaccaagttgttttgtggtatggcaccatttcctaagtaataacgattaatcgaaggaatagagattccagttagcattgccaagtctcgttgagttagtttttgattatataaaatttttttgagattggcactagtaattgcgatgatggattgtttaagtttgtctttcatgatattgcccctttaaaaatttaaattttatgtagtaaatcattattaatatatcaattttacgatatttttgtataagatcacaagatattgataaagaaaacctgattagatggatgtggggttgtaagaatgaatcctaaaaatgaaaaagttgcacaagacttgcttaatgaaaaaattgatattcaagaaattgaagatatattgttttccattgcgtttcttagtatggcagatgatcttgaactagatggacaacgacttagtgataaacaaaggctagaattaagcagctatttagctggggaagcattgggattaatggggaatagtccgaaagtattaaacagcagaatctatgatcaagactatattgccaaaataggtagcttggttgggaaaacttttgaagattatatgaatatgtcgggggttcatgatgaataaatatgatttatatcttggaatgctagctacacctgcagaattagctaaagtttttacttggcgctttagaagtgaggtgcttggaattcaaccgttggatagtaatagtttttatgttcgtgttaaacaacttaacgatcaatctattgacattaaagctaatcaaaaaattaagtatgctggcgagggaaaatggctagtagtagttgaaaggagctagctatgaaattatttttaagcatatatttggcttactttcttacgagtttgatttggatagcagtagtctttaacaagacagacgcagaagaaaagtatgttaatagagttaccaaaagagacaaacaaactgtgaattataagtctgtctcgcttaaagtgatgaatgttgatatgaatcaaggatgttcgatgcttgaattattatcaaatgatcatcattcttttgaggacgatacccctatagtgattaaggcaatcgtacctaaaaatcaaataaaagtttttaaagctaagcaagcaaggcaaattgaagccgatttgcaagtagttatcaatactagaggtaatattcctcaagttcagacaaaggtaataagagtttattaatgctaaggagaacgctatgtttttagtactttcacaaacagattggttttggattatggtttgggtctttattcttgcttcagcattccatctctggaaattggtttggcttgctttcggaatctatctgatttttccagctctgttaacactgatggatggtgtatggagaattgcactagtaattggcgtaatttttctaggaattaagggtgtaactatgggtattgcttggattaaaagaaaaattaagcagagcaaagaagtaaagaaggcaaaagcatgacaaaaataattaagcttcacccaatatagttcggtgcaattgccaattttgggtgtgaatgcaatgttagggtcatttgtgtcctaataagttgttgaaatattttaatttttagcgtaaagttgctataatattagtgaacaaaaaagagagctactgctaatagctctcctagtacgaagccgctaaaagggcggtggcattgattatacaactaaaaagtcgctaaactctgccaaaagtttgtgagcggctttttagtttgctctactttttccacaaatcgtggaatgctgcaatcatatcttttaaggctttgaaccactccgttacttttttggtaagcaagatgagacttactaccagtagacaaagcagatagattacggctatgacagactgtaaaaagcctgtcatttggcaaactgtacctcctttcaatagattttagggcaatagttaatacaccattggcaccacctccatgaaaacgaaagtaccaccgcttatttaactttttcgtactaaagctattctagcaaattagatgtagttatgatagctagtttaaggatatagaacaaaaattctgtatcttttttatttttagtcttgaaatatcgcaaaaacgatatataatataaatatcaaaaatattttagaagagagaggagcgagaaatatgattaatcaagttgtaatggatggttacatcggaaaagatttagagttaaaaactactcaatctttaaaaaagtatgtaacctttactatttgtcaaaaccgttatagtaaagttcaaagaggctatgttggtgagtggcaccatgtaattgcttggaataaagttgctgaaaacttagtagctaatacacataaagggtcaaaagtaatcttggcaggtgaacaaagggttagaaaatttgtagacaaaaatggtaatagagtagcgtatgaatatatttgggtcaattcatttgatatcttaactagtcaaaatgaggatatagccaatagcccttcacaaaatacaaataaacaaaatatgaataatatggaagatgaagagccagaagttgatcgaactattgtagaagcaaataagcaagataaattagcggaagatccttttaataatcaaaaagaagttcaattaacagatgctgatttaccattttaaggatagtatgattggtgagtgttggatggcaaggaagtcagtaaaaaatagacgttttagtgtatttcgagtaaaaaaagaagtttatgaaattttaacaatagatggctatcattattggaacattgacggagtatttgttaaggattcaggttattttgcaactgaaaaatatcgtaaaaatgataatagatataaaagaatacccttttatcaagtaagtgaaatttatgatcaaatttatttaggctttggatttgaagtaaatcctaaattaggacatcgcaggttattgtgtaaaagaaaatatcccgatcatcataggaaaaagccgctaattgatgttagcaggtaagatattatgatcagttcatttatattagagcattttcgatatatagtaattgcatttggaataggcaatttaatttttattatactgatggcaatatcaactttacctagcttagccggtacaaaatatgctattttttttgaaaaattagacgaaattgtgacagtattgctgcaagtttcagcaattactttatggacaatgattttatttattggatactattggagctacttaatgtaaaactagggcgtaatttaatgggtaaaaatacaggcaggattttgataataatttctctatataatttcatagcgacgagaagatatgctcctcttattcgtcattcggaatcaaaacttaatcaatttgatccacttaagatactcatgcatctaatgcttgtatgaaagttcgaatctttccgccctattatgaggaaaaaattatgtataaatttataacaatagcactgattatttatggtgtttactatgtatggcgagcgtacttaaatatgaaaaatttgaagaaaaatatggatgataatcctaaagagcttcttattggctatgacgctcagatcaatgggttacggagacaactagcagagactaatgaaataattgcacgagatcaaggatttccaccaagtttttcagttaacagaagacttaagaaatccaaaaggcaacaagaaaagttaatgcaacgaattaagcaaaaagaagctgccagaagtaattatttaaaattattgagaagttatcaagatggtgaaattgataaagttgcattgaaaaaatgggtaaatgaaaatcaaaggagatgataaaaatgaaaaattttagcaagtttgctttaactgcgttagctgtgacaggagcaattattgtagcagtagttgtaactaaccaggtaaaagaagtaaaagctttagaatgttaatcattaagaaagtcggtacggttattgatctttgatctttaatttagctgttcaactcagctagttcttttagggctggtaaacagtccattagtacattgaaaacagaataagcgtcaactatgctctggaacgggtgtaggacgtgtgcatgactactgagccgactcagtaggatttacgagacagagaattgaaggcacacacgggtggaagaagaaagaatcacacctgccgagatggagatagccgtccatcaataaagattactattatttttggcttgatgataagtcttagcttgaacgaaattttaaatttgaagtaatagtaatggctgtaataggctactaaaagataagcatacattctttttggctgttttgacatgtgaataccttgatgaaaaactcaagagtaaataagaagtcggaatgtgatcaacaatagtaagtgagtcgataaacttaactctttaagtgttgtagtaactgaagggcaagaaagagtctttgattaggattgataagaggacagcttgcggaatgcgtgaagcgagaggctagagataggtgaagctatctgctacgtactgtacaaaagcttacagtttggtggctaactagaaaaccatcatcgttatcggtcatagcgtaaaaccgttggtaattaaagagatcacaatttaaatggggattaagatgaaaaattatgaataattttgattgcgttgatcgcttgatcagcgttatgaaaaaaatacatgtaaaaagattaactgcggacgagtatgttcgctatcgtaataatttagcacaaagatatcctaaagaatttacgccaataagaagaggtgagactttgtctttacgggcattgctttctcgaaaaaatgatcaagtgaaattatcttttacttatgatcaatttggtaaatgtacgcaagagtatattttgaaacaataaaaattttacggattaattattacgctaattttacgtatttagtataatttaaggtaggtgaagagtaagaaaaaatctaaaaaactatgtgttgaaatagtaagaaagtaagaagaggagcaaattatgtttaagaaaaagaatattttagtaagtttatctgttgcaacattgttatcagttggggcagttggttaatcttgatttaagaacgttggaaggacataaagataagtatgcttatgcggctcttaaggttaaatatgatggtagtggcacatattctcaacgtggcttgaagttgaacttcactgttgtaggaagttatgctccagaatggattaaagcctgggaagcaagtaagtaaaattaatcaaaggtcaattagttaagctaattgacttttttaatacctaaattatgaagattaaagaaagtaggttagctatcaagcaacagagaaaaagtgataaaaagaaaagaattgggacaatagttagtattatcgcattgcttttaatcggaattgcaatttattgcattgcaaactttgaccatcttcaaggtagagctgctaattatgtagcgactaagaacttaccaagtcaaagaaagaacaagcaaaagaaaaagcctagctataatatgaaagctgttgaacctgtatcaccaaaatctcttgcaaatgcttatcaacatagaagagattatcgagctgtaggacaaatagcaataagagatcataatgttctattaaatatctatcgtggagttggtaatgtagaactgaacttaggtgcaggaacaatgaaccaatatcagaggatgggtaaaggcaattacgctttagcaggtcataatatggatgatgggcgttcgttctttagcccattatatactgcgaaggtaagaggaaatctacctaatggaacaacaatcttattaacagattataagaaagtttattattacaagattacatcttcacgctttatttcagtttataatttaagattagcttggaataataaagagtttaagaagaagccagtaatttcgttgtttacctgtgactggacaggtcaaggtagactttttattcgtggtaaatacactggctcagaaagttataagggagcttctaagtatgttagagggtcctttgatttttagaaaggaaaatgttatggcaaaacaagtttttgtagattttgaattaccagaagctatgcttgctgatacaaataaaattattaaagaaaggtttcctgcatggctagtagatagaaaagacaatcgagtggcttcagttcggattttatgggctggctggttattccttaagtattcggaaggattggctagcaagtattatggacgttttccatatgtagcatatactccttatacagcggtagatagaccttatgcttttcaaaccgtaatgttggaaagtgaatatattgatgcaatggaaagaatgagtcgtttgtatccagatgtctttgaagataagactaaggataagaattatttcttggcaattcttggttatgcttgcttaagagagttgtatgacaataatattgaattacactatgatacagaaaaagctaatgatctcgctgatagtgaaaatgcacaacttgattatgcatggttagaagatggtacaaataaaacattttctatcaaaatcaagcaattatcaaaagacaagtaattgccaataattatatattattagaaaacacctacatataaatcaatgttttgatttgtgacattgacaaaaatgcaggtgtttttttgttaaattaaggaggaatagccttgaaaaagctatcaaaaaagcaaactagagaattgctatctgcattaggtgtaacagcaactctaggtagtgtgggcgtaggtgtagcagtcgcaaaccataatgcaaaccctaatattgttaaggctgatgcaacagctgatgtgaaatatgtgagtgatgctacttttaaaaagggatcagatattgcttttgatatttactaccaagttccatacaatgcagatctaaagaaattggttcttttcgataaattggagccagtgtttactcataataaaaccagagtttttgatggtaacactgatgttactgatcaatttacggcagattttgataaggggacaaatacaaccaatatgacggctaagaagcctcaagattgggtaggtaagaagttaagcatgcgaattgaaaccacgttacaaaagaatgctaacttagacaagtatttggataagaatacgaatcaatacaacattcctaatgttggtcaaatgatctataacgatgaaaagatcaagaccccacctgtttatgttcatacaccgaatgatgaagaacctactgcaattaagcaagtagaggataagaacggtcaatatggtgaaaaagccaagcatgacgctggtgatgaattccattatcgagttcaatattcaattcctgaaaatggtaaagacattagtaatgttgttttctatgacgatttggaaaaggttcttgatcttgaagacgttaagatcaccgatgacaagggaaatgaagttactaaagaaggggatttaaaacttgataaagataaagaaagttttacttggcaaccttctaaagaatatctaactcaaatgccaaagcatatctacactgcagatattactgtcaagctgaagaccgatgcagatttaagtggatacttgaataaagcaacaaagaattacgaaattcctaatgttgctcatatgaagtacaacaataaagatattccttcaaatcctgttaaggttgaaactccacctccagccgaaaataaggtagttaaaagtgttcaaggactatcaggttcctatcatgaagatagagataatgttgaggttggcaaagactacacttataagattgactatactgcaggtgaagggcaacatttaaccgatgttgagtttaccgataagttagaagatgtccttgaccttgaaaaggtagttgttaagaatgccgatggtaaagatattaccactgaacaaggtacacttaagcttgatgaaaagaatgaaagctttaactggcaaccaaatgctgacttggttaaggttatgcctggcaagaaatatacagttgaagttactgccaaagttaaagacaatgcagacttacaaaagtatattaaaaacaataccatcgaaattcccaatacggctcactttaaggcgaatggtaaagacaccccatcaaatactccagttgtgaccccaaaggtagaagaacctaagacacataagggaattgttaagaatcctgcagattggacgaaattctttggcaataagtctgaaacttcctcaggacaagactctgatggtgatggtgcattacctaaggcttatcagaaagcgcaagaatatgtaaaggttgaccctaatactggcatttggagcaaggctaatgataaggttactgatgaacagtatgcagaagctgttaaaatcttacaaaagccgttctcaaaccctaatgcaggtaaagaagcaactagttcagatgtagcaactaaagctccaactagtaaagaggacttgaagcaaatcattagtgcttcaactgttgataataaccaagcttcacgtggtgatgctgtagattatctgttgacgtttgatattggtaattctcaaaatatgaaatcacttgtattaagtgatgatttggagaatgtgcttgacttaaagaatgtcgtcatcattgatagtgatggtaataatgtaactaacgaaggtaagttagttacttcagatgaggatgaaagctttacttggactgctaatgatccagctaagttctcacgtaagaaactatatgttgcaattgcttctaacattaaaccgaatgcagatgtatcaagttatgacaatagcggtattcctaacactggtcatatgcaaattaacggtcaagataccccaactaatgttgttcatactacgcttaatggtgatccaaagaaccctgaagatcctaagaaggataagcctaacgatccttctaagccagatggcaagaccccagacccatatggtaacttagtaaccaagcaagttaaagctgagtcgggtcaatggggtgaatcagataaggttcaagaagacaaggactttgattacaaggttgaatacactgttggtgataagcaagacgttaagtcagttgaattcagtgatgacttggaagatgtccttgatcttgaaaaggtaacaattactgatgctgatggtaatgacgtaactagccaaggtgaacttacgcttgataagaatactgaaaagttctcatggaagcctaaggctgatttagtaggcaagatgggcggtaagaaatttgcagctaacatcactgctaagttaaagaaggattctaaggttaatggtgaagtaccaaacactgctgatatgacagtaaatggcaaagacgttaagtctaatacagttaatgtcattccaccacaagcagataagaagtcaccaagcaacgtcaacaatcctaagaatcctacgaatagcacagagaatcctaataatccaaataatccaggaacaaacaatccaggatcaaataaccctattacaggtaaaaatggattcttgccaagaacaggtcactttatcttgcaacatgcaggctggattattgcaagtttagttgcaatggctggtggaattggtacttatttgtataagactaatgatgaatttaagaataagattaaagggttaattactaaaattactaagtaattagctgctgcttttgtcataaaaacggtatataatataggcagaaaaaagaaaataaattttccacgtattatatattggaggatactagaaatgaagaaaagattattggttagcttaagtgcagcagctgttttatctgttagctctgtggcattagtgaataataatgttgaaaataccccaaccgttgtacaagcagcaacctataaaaagaagttgacaaagaatgcttatatttataatgcaaagggtaaacgtgttggtaagaaagtattaaagaaaggcaaacttgtaaaaatccttggtaggaaaacgattaagggcaagaaatattacaagattggcaagaacaaatatgttcgtactgctaatttcgtagtaaagtttgcttctactaatacaagttcaacttcaagttataatactgggtcatcgagcactactaataatggatttacaaaatccagtactaagggagaatttccaacaagtaatagtgtacatgcaaaaacaagtacatcatctactacttcgaaatctagttcttcatctaagtcatctggtataaatactaatagtgatgattctggtgtaagatataacactaagaagagttcacttgtagatggtccaatgactgcagaatcagaaaaattagctagaaagaaaatgaatgtatatgtatactttactgatacggaggttcaacaaattgaagatcgtttatggcaagatattcaaaattaccgtgtatctaaaggttatccagcattcaagactagttcagaattgactaatttagcacaacaagcacaaatacctggtactagagaatttagtagattttctgatacaattagccaaaatattaatgaaataagagcatatcttccaggcttaacaaagttaggtatggatcaagctgttggctatgtagattcaactatttatggtttgaatcataaaggctttgtaattggtggagattttactcataaaggttggaaaccagttcaagtcgctgataaattatttgatatgatgaaaaatagtgaaggaatcgagccaagagttttatatggttggaaaaagcataatgcatatgcagcattaagcatgcattattattgggatggagaaggtagtagtgtaggaatttcattctttactgcagatggtacaagcccagaatgggttagtgcttggaataatgctaactaaataatctaatttaataattaagtataaagaagagtacaaataaaaacggctcttctttttttgttactcaaaagaaaggaaattatatgatttctctaacgaagaaaaacaaagtagtcagcttagccgcaattgcactaatggctactggctttagtctgggcacatttcttgctactagatcaggcattgtacatgcggataatgcagaaatggtaaatttgccgaaaggacaaaacgcagttggaacaaaaatggcaggttcatatgcctttattcccaagattattcagggtgtaactaaaatccatgcctttggtggtgcgtcacaagattgggctacttcaagtactaatactgaagacaaacatcactcttggtatgcattctctgttatgggaaatgaaaaattagctgggaaaattggtgtttattattcaaacactggtgttgatcctaacagcggaaaaactattgatgtcaaaatcaccgcaacagattggaatattcaatcctacaaatggcaggatacatctgatggtaaacgtgaaaaagttccattaaagaatccaacaattgcctttggtgtaagtccatattttgaagttttcacacctggacaaggtgcggttgcttatagaattgattttattgatcatgatacaggtaaacctttgaagttgaacttaaatcaaagtgtacgtgatattgatggtaaccaatgggtaggctatgatacatcaacttatggtaagattgaccaagttatttggggcgatggacaaaaggatggtaatacttggttaagttataaaaatactttaggcaataattacatcttttcagatgccaatcaacaccataccgctttacctgatggttcaggtactgtaagatcctcagattggaaggctgcatatacagcaacaatgtcaaacacagaccatattaatatgtattgggtttttggtactacaacaggaaaacatgcagctgaaaaccaaacagaaattgaagcagatactgataattggcaattgaaccaaggtaaatatgatcctgatgctggaatgactgataaggataaggtttctatttcaaatagtatctggaatggtacttttaaccatgcttacctaagattgtttgatatgccaattgtaaaagataaaccaatgaatcctaataaatatgtttctgacaaggatgaaggaactgatacacctagtgaagtcggtggaattaaatcagtaactcatgatatgcttgataaccgctatgaacaatatcactatcaaattacacattctgtaccagatgttgaaaagcgtttaaaatatacagaatatagaatcactgataatttagataatattctgaatattgatacaggctcaattagagtttataaccgtgcaaatcaagatgttacttacaatttcacagtaactttatcttcaggtaataacttatcagtaattgcaaaatctgatgctttggcaatggatgacttctacaatgaaacttacaagattacctttgatgcaactgtaaagcgcggtgaaagcttaaaggatcacgcagatccaaaacataaagatcaagctgtaatttacaacgaatctaaagtaattcaagatagtggtagtgcagattctaaccaagtaactactaatattccatttactaatcccaaggatgaaaagtttgtttcagaagatggattaggtgattctaagtcacttaaagacgtagactttggcaagaaatatacttaccgcgtagaagctactgtaccagataatgtgaatgttgattctcttgcaattaaggatgctatcgaagcagacgttcaaaacattaagagcgttaaggtttatgactatgacgacaaagatagtgctggtaaagcaaaagaaattactgatcaaggtaaattagacgttaataataagactggtaagatttcgtgggtagcaaccgagcctggtaaatggcatggtaagcacttgaagatgttcattgatactactttaatcaatactcctaaattgcttgactacctgaacaaggataatggacaaattgaagtaccaaatcaagcacacttcttgttcaacaatgaagacttaccaagtaatattactcacgtatcgccaaagacaccaaaggcttctgcagataagaagatcgaggtttcaggcgactataccagtgaagatgttgacccaacaggagatggggacaagaataaaaacactgataaagacaacaagcgtgaaactgaaacattaccaggtaacaaagacgaataacgtataaaggattagatgaaatggtgagaaagtctaatccttctttttctttcgggtgagatggtgggcaatagttaaggaggaaaaatggttcttagcaaacaagacaagtccattttacgcaagctacataattcccaaggcttaacacaaaaggcttgggaagaaaaaattatggttgagtttgtacaagatttgatctcaggcactaaaagcgcatataaagatgcagttttagaagtcgcaggtaaaaaagaattatcagaacagttagaaaaattgcagattgctgaacctgataagactttaaatgataaggttacgtcatcaaaagatgataataagcctacaagtgattttaatgggacaagtaaaagtatttagtttagctaactaaatgctttttttatacaaggaggattaacaatgtttttagctgtttataccaaattgacctacttattttggagcggcttaatcggtactcaggcttttttaaacgaacatccagttttacttaatgtttggagcaatattaataaggctactggtagtaccgaaaagaacctgaagagtatcgccaaaggtctgttcattgttgttattatcttggctggtattcttttcgcttttggtaacagaatgtcgcaaaatgcaaagcaattattgatgtatgcactggtaggtgttgccattgttgctttagctgcaagtttagtaccatcattcgcaaatatgtttggttggaatgctagatagttagttttgtaagtaaggtgaagtaagtttaacttactgggttgatggtgggcgttaaagaaggagagaagattatgctattagttacctttgataaggtaccaaaaggggcgaaaaaatattttcaatttaagcataaattaagtagaaaatcgcctgagttagacattaaaactgcagatgatgcagttaaggactatgccaagagcttagaagaagctgattctaatgttacatttactatctttgatgatgaagatgaggatcgtgaagaaagcagctttgaagcacaaattttacctgaggatcaagacgggggtattttaaacttgattgatcgtgatttagagaatgaaaatttaactcgtgatcaagaagaaacagtaacaacgctaaaggatcaaatctttaatgaacttgaacctagtttgaatgatgatgaagatgacttaaatgaagacaatgggttcatgtttaatagtaatcaaattctagattcagatgatgaagtgcgtgatgaaatacctactgaaaatgatgtaaatgatgagactgaggataacagtccaacagaagaatcaaatagtaatgccgcagccaatcctagtttgaataatgttcctacacaattacctgaaaaggttggtgcttcaccaattcaagcaggtcaaacaactgaaacagaaactagtcgcagtgaagtaattagctatggcaaatataccgatgccaatgatattcttgaccgtttgccaagaggatatgataaaaatcaatttgctctaaataatattcgtcatgatttaggctatttggataatcctaaagatcaatatgatcaagcgttgaatgataaaatcgatcaggcgttaagagattattcaatgcaagatattcaacgtgtatatgatgaaggtttagcgaaatcaaaggctgcaattgtagatagattaaaggaagcatataacagggttactaaagagtcactagataaaattgttgaaggcagaacagcggcacagatccaacagctagtagttaaagcaactcaacagaagcaaaataatcagtctgacttgagcaagttaaaagaaaataaggcattagaattgaaaactaatgatgaagcagcattagctgagtataagaagcaattagaggagaaacgaaatttagctctaaaaaattttaatgatcaagaagaacttaaaactcgtaatgctaatgaacaaattgatgagcaattaaagtctgataaagctaaagtagaacgtgttgcgcgtgatgaagaagtacaaaaacgaaattctgagttagatgatagtagaacaaccattagtaatgattttgatcatgcagttagaaataactatgacaagaataatgatttatttgaagacaatttaaagaaggttcaagaaaaagttcgattagctaaagaacaaataaatcaacaaaagcaacttgatcaagaaaaggctgaggaaaagcgtcagcgagaagcagaagctgctcgcaaagaacgtgaacttgatttaaagcaaaaagcaattgagcagaatgagtctttagcaaaattgcaacaagaaaatatggcaaagttgcctgaggaatttgcaaaagcgattgctgcagcaattactcaaaataatttagaaaatcctaacgtaaaaattactttaaataatgatggaaagaatgctttagtgcctgtgccacatgttgatggtgaagtagtagacttagatgatactaagaaaaatgatgcaccaattgattctgaatcaaatgaagaagattcagagttaaagccagaaaccgaggataacagtcctaagaaacgtcactataaatctgaaattatctcattagtttgccttgcagctgcggctttgggtggtacatgggcttatactaataaccattctaataatgaacaaaaagcttcaattgaacgatcaagttcaaactcgcatgtcaagaaaaacaagcaatcaagtagtaagcaatctgataaaaaatcagctaatgaagatattgctaaaaataaaaaacctaatgctaaatcaaagactaaatctactccaacttatttaactaggtcacaagctattttaaaacaatatcgtgaaactaagacttgggcacaaaagagagatatgctagatggtttattagggcaaggtgacgcaagaaatttaaagaagattgctacaatatattcaaatccaattgctagtttgtacagtgccattgctaatgaagacaaagctcagacaagggatatttggctaagtttaactgatgatcagcgaacagaaatttccaactcagctaaaaaagctgtcgcattggctttctatgatattgctgattggcaagatgggtggttagctagatatgcgtactaaaaaaagaagatcacgaataaatctaaaaaatgctagaaacaaggaaaagaatcttgtaaaaaagggcttgtatcaagttgaaagacaattacatcgtcccaaaaatgaaaacaagcagtctagcaatattaattttaattatacgaagctgataacaacgttggttataggaatttttatctttctagtaataatgtggttattaggagcattccataatgtcatgttacaaactaaaagtaaaaactataacttattcacgaatggtctcgatttagataaagcgggattagctggcttgaatttctttaagacacagttgaagcccatggcaattttagaggtatttgctgctagcgtaattattggtggattgttaagtcaaaaattccactttgaaagtcaaaaagtcgctcatgggcaaaagggaaatgcccgttttactacagttaaggaattagaagacacctatgtaaaagttcctgatcatagtcaaccagggttagatcctaaaaagcctagctttaaaggttttggtgggttccccattgctcacattaatagattaggattaaccaaaaaatttccatttattactaaacatggctattatttcattgatacaagtacagttcataatttgattgttggtacttcacggtctggtaaaggtgaaactactatattagaacaaatcgacctagtaagtagggctgaaaaacaatcgtcactagtcgtgaatgatcctaaaggagaactgtatgttgcttctgtaaatacgttgaggaagcgtggctatgatgtttatgaattaaatttagatgacccaaacaaaggaattgcatttaatccgctacagttaattattagaagttgggagcagggtgatgttgaaggagcaatgcaattagttaactcaattacctactcgctttattttgataaacaagcaggtcaaaacaagtgggttaatgacggcgcacaatcagctgttaatggtttgattattgctttgattgagtattgcatgaatcctaaaaactttagagataaaaaagcccatccagaatatattacttttgtaaatatcgctgatttagttaatcagttaggacagatagattatactaatccatcagatccatatactcaacacaacgttttaagtgaatactttaagcatttggaacagggatctattgctaaaaaagaattcggttccacaaatttctcaggtgataaggcaagaggctcaattttttcaactgttgtacagaaactagatattttcactttaccgaaaaactcacgcatgaccagtatgaacacactagaaatgaaatcaattggttttccaaaatatttggagtttcaattgcttgatcaacgactatatggtgagttaattaaaatcaattttagagataatcataataaaaaactgaaaacgaatgagattcgtgttagtcaaaaaggatttgttgaaaacaactttgatgtcaatctaaaaacaggaagctttgttgaaattgaagctattacaggacataagcgtttgaagaatacttttaagttaaagattaatcctaaagttaaaaaggttgaagtaagtcaggtaggaaaacctgaaattaagatggaaaactttaagatgcattatagtgataagccaattgcagtctttatgaaaattccagattcagatgcttcaaacaacttgctagctacaatttttgttaatcaattatatacagaattatcacgtcagtgtcggctggttcaaggtggaagtacaattagacgagtacaatgtatttttgatgagtttggtagtatgattccgctgcagaatatggatcggattatgacagtttcagcaggtcgtaatattctatttactttagttatccagtcttatgcccagctctacagtaagtatggcaaagaagacggacaagttattaaagaaaattgtcagaataaatgtttgattatgtctactgattcagctactaacaaagaattttcagaagcttgtggcaataaaacgattgagacaagcaatatttctaaagatcaaaatggtttagccaaaaatgttagtgttagcgtagataaagtgccgttgatactaccagaacgattagaacatttagctggcggtgaaagactagttttgagacctttaacaagaatgaataaatggggctgggcggtagtttcacatcctatttttaacacaggaaaaacattaatgccgtttgcacatacattcttaactgatgactttaatcctaaaactaatccagatttagttgaaaagattgatgcacatgccaatattaatttaaaagcattagaaatcgattggagcaaatggttaacttggactgaacaagttaccaaacaagatgaagatggaaatgtatttgtagaagaagaaaatttggctttgcaggcatataaccaatatcgtcaaagtgacgcaaatgttcaagcagctgctaaagatgctaaggaagaacaagaaatgaagaagtctttaaaggaagaagaaaatcagattccaccatttatcacgaactggttaacggaacatgatggtgatattagtgatggaacaaaacaagcaatattgaacgaggctacaaaattaaaagatgtgcctgaaggacaaaaaccaagttcaatagcttttgttaatatcatctataaagataaaaaattagaagataagaacaaggaaaagaatgagttaacacaggaatttagccaaagctttaatgaatattatcaagataagtagcgataatgactacttatctttttgtttaaagaaaggaaaaattaatgacaaattggttattctatttaactagtttcattaatcctgagtatcttgatatttttagtagtttggtagattggtggcaaaaatcaaccaattcaggtgattatgatccagccaaattacaaaaagtaactgaagctctacaaaatgcggcaccttatttacattatgatgattttttgggacgtattttgaatcagacaaaatggggtatagttaagatcttttatggatttgccaattgggcaagtgaactagcaacagatagtttggatttctcaggaatcttaaaatccacaggtttaaacactaatttaattaatggggtaatgggaattgctgcagggttgatgattttaaccttaacttgggtcggaattaaaattggtacctcaagtaaagctcctcaattaaaaaatgtcgtttggcaattagcaatttcagcgttcttaatcggaaatattcagccaattacaaattgggtggttgatcagtctacaggtgtatataaaggctttgtacaggctgataatgataaagggacgtcaagcttgccatatcaggtagtacaagccaattctaatgacctattagcaatcatagctaataattttagtggcttcaaaatcaataatggggatactaataccaaatgggaaggtgtttctaaagataaaaatggtgaaattaaagaccagagacaaaaagatgttcactatggttcatttgctatgaacaagtctgattttgatactgcaacatcaggcgatttatcaactactatttcagctgatttagctgagaaattaagtaataaagcaaataagtctaaggaaaaaccagcatgggaccctgacaatttgcgttataaattagctcctacaggcgttggtacgaaatcaaatgtaaagggaaaagcatattcaggatattatgcaaccaaagtaagtcaaagcaatactgcctttttcaaaatttttaacggtgggtatgaacgatattcagtacaattcttcccagttgtagttgccttattttcaatgacagttgccttcttactagtttgctttgtttcagtaagagcattcttggaattggcaattatgcaagtattatcaatcattattttctccactgatttggaaactggaaagcgtactaaagctgcggtacaagatatttttagttcagcgttgttaattgcattccaaggctttgaattagcgttctatagaattgtagctgtgtggatgagttcatcagatgcaggaaagattcatgataatccttatctatatgcagttggaatgattgctttaacttgggcactttgggaaggttcaagcaaggttcaaaaattctttggtttggatactggacttaagcaaggctggagtaaagttgctggaggaattgcagcaactgaatatattgctggtaaaggtaaaaatttagctgaaggcgctgttggagttgccagaggttctggtaagttagcaggggcagcgattggtgaagctcaagcttggcaagctggtagctctactaaggctattgctaaagaaaatggagcaagcaatagtgaagcaaaacaagctggcagttatgcaagaagagcctttcgttcagctcataacgactttaagcagaatggtggcagtgcagttgattggaacagggcagtaaattctggtgctgtatctgaaactgtacaagatgaagccgctagaatgatgagaaatggtggtttaactgataatcagtacaacactttacatcataatccatacatgcaaaacagagctgaaaagaatggtggcagtgcagaaccaacaggtattggacgtgatacttcatttgtaggaaatccaaactatgatggcaagaaagaaacagtggcaacaagcaatgttgattcagctaaaaatgtaaatgaccaaggtaagaatacatcagttaaacctgataatattcaaaaccaaggcattaagaccgatgatagcaagcctaaatcaaatgctgctaaggaaagttcaactgacggctctattaagtcaacaggtggagctaagacaactggtaatgatgcaaaaattccaaataccacagttggtgaagcaacgaatggttcaaagactggtaaaaaagaaacagcaaatgatcctagaactaacagtgcttcagttactggttcaggttcaaagcgtggtgaagcaaatagctcttcaagctcaccaacaagtagtaatgcggtcgatgaattaccaagcttgagagatactcaaaaatccactagtaagttagcaagtcaacaccgttcaaatcaacaaaccacaccgccaaaaccagttggtgaaggcggtagacacttaagcaatgtttcagactttaagggacaagacagtcatagtaaagtaactgaaactgctggtaccaaccatgtagatattgaaagaaaggctggcagaactgaagtatctactcatgatgtaggcaatcaaggaatgagtagtgtgaaggatgctatgaagagcagcgtaccttcaaacactaatagaaccgttgaaactcaaggcaatactaacacggtgactgaaattaagcatgataagaccacaatcaatcagcaagttgaaaactctactgaaactaaatcaccaagttctaccaacattggcaaattaggtcatggagatagcagaagaaaggattagtgcatggataaatatcaaaaaataatgattcctaagtcaactaatgtatctatccaaatctttttcctagatatgtttgatgtttttgctcttttcattgggggtatggcaggacaacaaatttcttttctatttaatttacaaccgacttggcaattagtaatgacaggttttggagttgtagtaggaattctgctagtaatgcgaacccctctagcgccaaagattagaaattatcgtgttttgttaagcattatgcgacaagaccaaagcagatattatccattatttttagaaggagaaaataatgcgaacaaaaagaaaaagtagaaacagtaggagcaaagctcctagcttgtttagagcttttggcttagataaaggatcaagacaagatgcaagagatcaatcaatagttgaatacttgggctatagaaactgctcaaaagacgggatacttgatttagtagatggcacccaagcacgctatttgcgtgtacattcgacagatttatattcacttgatgatgaaaccagaagtaaatacctagattcatttactacatttaatcggatttatagcaacgattataaaattgtagtcatgtcgacgagaattgatactagtgaacaacaacagtattttcgccatttaaagaatgggattcgttcacccaaaaccagatatgaaaaaatgcgtttacgattagttaatgaaatgttgttgcaatcagtaatgctgtcaagaaatacagaagattactcagatgtgcagttttacattatgatttttggagaagatttgcacgatattagagttaacactagaaccgctcaatttgctgatcaagggttaatgggcttgagaccattgaactataaggaaacagttaaggtactctttagagaaaataatttgaatagtaagtaagggagaaaaaatgcgaatttctagtttattgaaagcgaagaaacataaaaagaaaaaagtaactgtaaagttaaatccaagacaggttactagtttaaaaaagcaaagagaactacaaaaaaatggttataataccaaatttttagcagaagtccagccacaaggcgggattacttttgcagacaattatgcaattgctagtgatggatatgcggcttgtttatcggtaattcattatcctaacgatccattattactttggatgactcaagtggcattgaatgattcaacgttaactacaattgatgtaaaaactgattctggttatgaaattaagcgacaactgaacaggtcaattgaagaattagctgatagacaagttaatgcgagaaaagctactgatgcattaaatgcacaaaaggatatgcaatcactagaaaagtatgcattggaattaagccaaggcggtgaaattcctaaattgatgctaactagaatttttgtttatgctccaaccattgaagcattagatcaatcggtgtctaatcttcgtggcaaacttcggggtgaaggttataatgttgctgtttatatgtttatgcaagataaacagtttaaatcaatggcattaccaatcacagagcaagaaaaggatttagcagcattgccagaacaaccaattccagccttaacggttggagctggtgacccattttcagctcaaagcttaaaggaccctagaggagtctggttaggtcgtacttcaactgggggagccttttattttgatcaatttagatcaactaatatcagaagatcgtttaatatgatgatcttgggtaagatgggtgctggtaaatcaactttaatgaagatgttggttgaaggtacaattgctagaaatatgtactttcgtggaattgataagactaaggaatatattcctttaattaagcattatggtggaaccgtggttagcttggatggatcagaaggtatgattaatccccttgaagtaatggcaactactgtagatgaaaatacaggtaaggttgatgagctagcaagtttttaccaacatatttctaaggtagatattctattccaaatgattaataagggatcctttgtaaatattgaaatgcaagaatttgattcattgttacgtggattttatgtagacatgggattattacctagaaattttcaacaaaataaaggaaatataaaaattactaatttagatagtgaaaaatacccgacttttagtcagtttttaaattggctaaaaaaattggctacgccaatgtactatcaacaacatcaatttactgctgaaagaataagaacttatgaaaaaatcaaggtagcattggaatcaatgattgagaattacggtcaattatttgatggttattctacaatgagagatttgacagatactaagcttctactatttgattcttctgctatttcaacaatgaatcaaaatgtttatcaggcacaattgtatatggctctaagtttaatttggagtcatgcattgataaatggtagaaaacagaatgctctgttaaaggcagggaaaatcacacgtcaagatgtacagtattttgatgtgttcctggatgaatgtcataacatcataaattatgaaaatatttttgcggttgattatgttaaaaacttcgaacgagaaatgagaaagtttaatgcaggtattatatttgctacacaatcaccagaggaaatggttcccgattcggtagaatcagctcagctatcaagtttaaaagtggtattcgagctttgccaatacaaatggctaatgagtatggatccatctcaacttaagaaaatcaaaagcctattaggcgaagcattaaatagttcagattacagtaatattcctgacttgcagacaggacaagcaattgtcacgatgggaggaagagaaagatatcaggtcaagatgaaaccatctgaacgacaacttgaaatttttgcaggtggtcaataatgataacaaatattaagcggttaagacagacgaaaagatgggctggattagccgcttttttattaggaattttagctgttttatcagttatatattttattgtaattttaattgcagcaatgggagctgctacagatgatgaatgtgatacaggaggagaacaaggaggagtagtagaaggacgaattagtgtcattgaatcacctaagtatggacagaccgctatgatgcatatagcggatgctgtgcatgagaaaactgggattagtgctagattactttttgctcaaatgggacaggaaacaggtaatggtgatagttcagttgctaaacatgatcataactttggtggtatgacttattcagaaggaagcactatcggtaccaaaggtgaaagccgtggtagtgaaggtggtaattacgttcactacaagaacttaagtgattttgcgaccgagtgggctgtgacggttcagaatggttttaaaaaagctggattaggaaaagatgctacagttgctcaatatgctcatgcaatgaaaaaagcaggatactataccgcagctgaaagtgattaccaagcaggtatggaagctcaagctaaaaaatatgatgccttgaaaggcaataaatcactagctaaaggtgatgggtctagtggctcagataattcagctgaggaagattgtaagccaataagcggcaaatgggggtggccattcaagtcaattcctaaaaaaggaccaggtaatacaatctcaggtgagcaattatttggtaagtcatctacaagaacaggtggctttcatgatggtgttgactttggtactgttccatatggtggacaagatattttggcaattcatggtggaaccgttaagaaaattgcatttcaaggacatactcaagatggtctaggaatgtacgtttgggtagaaggctccgacggttggaatgtcatttatcaggaattcggctttgatgaagcagatttgaaatacgtcaaggtagaggtaggcgacaaagtttcagtaggagataaaataggtcacttagcaagtaatgcacatggtattactcacgttcacattggtgcaactgaaaaagattttgctaccgcagagctctctgcgtacaaagatgatggtacttggaaagacccaattaaattaattaaagatggtttgaacaatgatgcagaatctgaagaagatgatggcttatcaaaaactgaatctgaagcacgtgactggattgttcagagagaatctggaggtagatgggacgcagttaacccagctaacccaagtgtttatggacgttatcaattaaagagagaatatcttaatggtgattacagtcataagaatcaaacaagggtagcaaataaatatgtaaaaggcagatatggttcatggcgtaatgcacaaaaattctggatgaaacatacctggtattaatgccaagaaagaaggataaagatgaagcagcagaaaaaggagcgagagtccaatctgaaagtatggatgatgacagctggagtattattcgctgttctgggaatgtttgcaattgccagagttcctaaaaatgatgaactgaatgatattagggcagaaattaaaactgttgagaagcaaatagttcaagagcaaaatagtcaaacaaagaattctgcatataaacaaaagtttgatgtggtgagtgcagaagaagaggcacgtgacaagtttctaaaagtgataccagctatctatactaaaagaaaattttcgtcagctaaacaaaaagaagaatttagtgcttggacaaaaatttttccaggtaaagagggcaaaaacttcatcaaaaataatggagattcttatggttatttaagaaacaagagtacaacggtttactttggtgacttaacagatgtaagtcatactaagattacagtagtaaccctagtcgaaagtgccaataaaaaagaagttacttatggttgggactttgattataatcttaagacccaaagaataaatagctttaaagaaatcaacatagagaggaactaagatgaataaaaaatatcttttaggtggagcaatcctcggaatcatgctcgaattaggcgtaatcaattatgagactaacaagcaaaaagctatcgactatcatgttggtcaggcaagaactgagttggctaaaaagcaagatgagttaaaaaatgtagatgctaaaattggaaattcgcaaaagcatattgctatgaaggaaggaggcagcaaagagaaactagctgagcaggatgtagcacagacaaaagccaagaaacaggtaagtaaactgctaaaactgctttacacgtatgatagtggtgatgaaaaattaaaaataccagacaaggtgaaagatacacatttagtaagtgaaaaagtcttaaagaacaattctatgtttaaaaatgataagcaattagagctccaatatagtggggcagatatgacaggtcagattgatgaactagatttgaagacaggtattttagaaaataaccaagtgcctgtatatgccaaagtttattttgaaatgacaaaagatgatagaactttgggaacaccaactgatgcttaccagctgatttatgatacagcgactaatcaaattacttcaattaagtattttggtcgctatcaaattgatcgtgaggcagattaagatgcaaccgaaaaaagaaactaaggtaaaaatcattgcagttagttgtgcaatgatttttttgttgttcataggagttattggttttaatcaacatgttaatcatgaactaaatcaaaaaaacatcgttaaaatcaaaactaatgatgactcaacagttttattttatcgagatgactgcaaaagctgtcgttctatttttgagactgtaaaatagtttgtgtaaggatgaatgattccttaaatttatttctttaaacattagaaaaaggagttcctttctcgtatgattggtttgaacaaaaaaacacatacagaaagaagaactccttcatgaatgattttaccaaagattttgctcaagctctattcaatccagacaaaataaatgatttattgcgcaaagagctacaacaggctgttaataacttgttagaagctgaattgactgcctttctgggctatgatccctatgccagaaatggctggaatactggcaactctagaaatggtgcttatttccgcaaagttgatacgcaatttggcccaattgaagtgcaagtgccccgggatcgcaacggtcaatttcatcagcacacgctgcctgactacaagcagcactcggatatcttggaaagcatgattatcaagctttactccaagggcgtgaccaccagggaaatagccgatctaattgaaaagatgtatggcagccattacagtccagctcaggtatcaaatatttccaagcagatgattccaaaggttgaggcttaccacaaacgcaagctaagcgacaagtttttctgcgtctatttggatgcgacataccttcctttgcgccgagaaacatttgattgagcgtgaagcagtctatattgccattggcatcaagcctaatgggcacaaggaggtcattgactactgcattgcgcctagcgagaacattgaagtctggacagatatgcttcaaaacatgaaatcccgaggcttaaagcaagttgagctttttctttctgatggtgttgttggcatgaaaacagccttggccaggacttatcctaaagctcattttcaacgctgtttggttcatgtcatgcgcaatatctgcgctaaagtacgcgtcgacgatcgtgaaaagatcatgaacgaattcaaacaggtgcatcaacagacaaacaaagaagaagccacagctgtcctgcatgacttctataccaaatggggcaaggtttacagccatgttatcagaagcttgaaagacatagaaccagatctgctggtcttttataactatcccaagcagatcagagcttcaatttattcgactaacatgattgaatcatttaacaatgtgatcaagcgcaaagctaagcctaaggcagagtttccaactgaacagtcgcttgatgcttttattggcattcaggcaatgagctacaatgaccgttatttcaatcgaattcataaaggctttggtcaggttcaggacaccttagaatcctactttgattaaataaataattaaaaaatcaatttacgagaaagaactatttacacaaaagatttgacagtttcctattttttcatacgctgtaatgaaaaaagatttatttagaaagaatatacagtttgtaaatactaatcaaccacaaaaccgacactatattacggagtataagttaactaaggtaccaacttttatccatttaaagtatggaaaacaagtagaaaaatatacgggaactaacatagaaaagatagatcaggtcataagaggtgattaaaaatgtctagtcgaattgtatatcaatcagaaaaaactaaactaaaaaaatcaaatcatcgtttgaaattagttgccttagttttgtttttgttatcagcagcacaactaatggcaacagtttactttaatcgtgataatccagattcagaaagtcaaagacaaattcgagatcaacaggagcagattactgaattaaaacaggaattaaatgatagcaaaaactatcgtgtacattcggatgacaattagaaaggcaaaaaatgattcaaagcaaaaacaaaaatgaattgaagcgacaccaaaaacataagtatcgcaaaatttatttatcattcattggagtggtggctgcaatttttattgcaatcgttgctagtccctattggacaggaaaatcaattgacactgagcaaactgttaatgtagtgacaggcaattcatcattttacctagcaaattctatttacaataagcaaagcgaaaagatgttgctagagtattatcttggggactctacagacgtaacatctactagtgacgattcagacttaagcaacttaaagtatgctataagagtagtaaacatgtcacgtggcggagaagatggagaagagcttgcgatcaaatcacagaaaatcaataatcactttttagtaattgaggttagcggaatcaaaaatggctttggagatttaaagattgatattctaccacaaaaagttaataagcgagttaacatgcaagatttctctgaaaataattatattgagttcttcattaaagagaataaggttgatctgacttcaagcaaagtaactaagagctatcaaaactatatccttgattatcgtcaatatctgattaattggaataaaaagaagattagtcaagaacaaaatacaattaaggatgctcaagctacgattcaaaattctcaaaataatttagattctgcaaaggcaaagttagaaaaagttggtgatagtcaaaaagaaaattaccaaacacaaattagtagtttggaaaatgatatttcagaaaacaaagcagctatcacacaaagtcagcaagcaatttctaaatatgaagacacaatcagagacattaaggacggtgattttgataattaggtgcaaaatttagctaaaaaatgttacgtcttggacgtaatgagctacgtaagaatacgtcctgttcggatattacaaaaaaacattacgtatcaagacgtaatgtcaggtaaaagacgaacaatttagaagtatatagacgtcaaattaatcagaagtgatatcacttctaaaaatgcgaaatcgcttggtacaaccaagcccagcacaccttgataaaaggcgtggggtcagatttcccttatgctctttactagagataactaaaagaagcagattttagtcaaatttcagagtagaaactagaaggaaaactagaaactagaaatcagaggaaagaaaaattatggtaaaagttttaatccgtggaatcagcgaacaaaacttggctagaattgatcggattgttaatcaattaaatcaaaattcaagtaagaaaatttccagaaatcaatttttgagagaacaaattgaacaaattccaattaattttcaaaatcaaaatgaagattcgcaaactagtttattgattcagaagcagaataaacttctgcaggaaaatttattagggctgaatgttcttgcaaagtatttcattagtggagatgttaatgacaccgaacgagcattaaatttgttagatagtttgtcagaagacacggcaaaagaagatgattaaatttagaaagagggcaagaaatgggacgacagcactttttgcaatttcgactcaacgataagcaatgggaagaaattaggcagattagaaaagaacattgctttgataataatggtcaactttataagttcttattcttcaatgccatgttaggtgttcaaaaagaaaaagaactggaagagttacaaaaaattaatcaaaagattgataatgctttgaaaaaaagacaagaaacttacgctgattaagaggaccagaaaaaatgattaagacaacttttagagcgacaatttctgatacagatttagattggattcaagattataaagaggaacacgatttaaaaaataatgctgaagtaattcatcatcttatgaagttagcagaagaaaatgaaaaaaattctaagtggacaaaagatttaagtgatattagaaaacaacagcgatttaccaaagaacaagttgcaattctaacagaaatggtaagtgagtttttgatgactcaaggaatgcaaattgtcggaaatggaattgatgcagaagtttataaatctgcaaagagaaaagtaaaagaaagaattaataatagaatggaggaaaatggcggacaacttgagtaagttttgatgctgagattgcgattctacggcttttaaaattgaaagagcaaaataattaatcaacttgcttcatagaatttttatttgtaggaggtaatttttgggacgaccagctataattttaacttcaaaattttctgtgccgagttcacgaaaagcttttggacgttacgttggatatatagccagaaaagaagcattagaagaaaaagaatttttaactgcagaagaaaaagatgaattaagtcgagttaaaaaacaagtaagaaaattaaatcaggaaaacaactttactagagtaaaaagtgaagaacattctgaacgagaagcagctgctgaaaagttaatggaaaagagaaatttttttgatttgaatgataaggaatttgataagtatcttgggtatatggtacgaattgatgcattaaatcagaaaaagaacgaaacgggactaaataccaaagaacaaactgaattggaaagaatagggcaagctgcaagtaagctgagtgaaattcatccaaccaaagaaaaagttttagatggagtatttagctctgacaaagatattgttcagttgaaagatttagattatattcgtgagcaattaaatgaaggacaagagaataattctgtcttgtggcaagatgttgttagttttgataatagttttttaaaaaagaaggggattttatctagtacaactggaatattaaatgaggaagaactacaaaaggcaactaaaaaaatgcagagtatttttcaaaaggaaatggatccaccattaaatgagatgtactgggtggcttccattcatagaaatactgataatgttcatattcacattgcaacagttgagaaagacccaagaagaaaaattataaaccgtgaagggattagtcaacctaagggtaggcgaccacaaaaaataattgatcatatgaaaagtggttttgctaatgagttgattggttcttcagagatgactaaagaattatctcagagacgtcaagctattagagaagcaattcaggttaatttgactagtcaagttgaacagccaacttttcaagcagagataaatcaatttgttagagcattgcctgagtcaagaagagaatggttttacaacaagttagataaaaatcaaaaaaagatgtcggatcatttggttgatgaattgctaaaatataactccgattttcaaaaatataaagacttagtttggaaaatgcaagatgaccgacaagacttatatggtaaaagtaaacgtgaaaataagaattatgcaattaaccaactatatggcaaagaaggaatttatgcaagaaatggtaacgcattgctagctgatttaagaaaaattgataagcaagctaaccataatcaaagacataggattaattttaaagataaagttgatccaaacgaatatattcaatccgcattgaaagaaattcgtaaggatacaacaatacaaaataataagataaaatcaaatgacgactatacacttcattcacatattattaagcgtagaaaaaatctaaaaggacatatttacttaaaaaagccttttatcagtcaaagtcaaatacgaaaaattaaatctaaccaagaaaaagtatttgaaaagacaaatgcggatattgaaaccaagaagaacttacgtgaatttgagaaattgcaaaatgaagttgaacgagaattagaatagaatcatcttaatttgtgactatatagttagtcgggtataggtggggaaattagcaagtagttttactacttgcttttttgacgttaaagaataggagaaaaaataaatgcttacttttacaaaggaacaaattaaggcagctaattcagcgagtattgttgaatatgcaaggagtgcaggaattgatttacgtcaaacaggcagcgatgaatttaaaggggtagaacatgattcattggtaattacaccatccaaaaattctttttactggaattcaagacaagttcatggaaaaggtgcattaagcttttctacattgtatgaattgtcaggtagcaatttaaatgaaaaagagaaattcctaaaggcaatggataaggtgttaactagtggagtaggtgatggcaaagtttatcaggtccaaaaagaatccttcaagtttgataaaaatcaaatagattcagaaaataaaattaatcgagtatggggatacttgcacaatcaacgtggaatttcgagtcaaactatagatcaattacatagagacaaagtgcttgcacaagataaattgggtaacgcactttttttgtggcttgatcctcaagatagacgacaagttaaaggagtatcaaaacaaggtacaaaaattaatcatcaaaaatatggtagaagaggaaccctcaaaatgattgaaaaaaattctaccaagggatatggtttttcattcgattcaccaggtatgaatggaaaaactccagaaaatattagattttttgaatcaccaattgatgcaattagtttctttgacttgtctaaggtaaaagtaaagggtggaatgaaaaatactaggtttgtttcaatggatggccttaaaaaagaagtgtttgactcgtatataacacaaacagcagcacaattacaaaaagaaggtcgaattcttaaaagtgtaggtttaggtgtagataatgatgaagctggaaaaagatttgttaaagatattcaatctaaatttcctaaagttaaatactgtaaacctagtgaaaaattaggtaaagattggaatgacaccttaaaagcttttcggaaaatgcaacaaggaaaacaaaaatctaagcatacaaccagaacattaccaggacaagaatttgaaaagcgatcggcttatttgagaagagaccaaggattagaaagataagcatatagaaaaagcagttagtcagtgactagctgctaatttaatgcaaaaaaagaagcacataccgctttccgtatatgccgctctttaatgagtctcactgatctattcctcgccttctttaagctagcatatcgctaaggtagtaggcagccaagttgtaaatacaactctttaatttgcactgtgatctttacctacattgtaacatgaaaggataaattaatgaataatagacattctgactagcatatcgtcaaggcagtgggcaacatgatcaagtaatgatccttaatttctactgctattcttaaactttttttaacacatattcaataagaaaaagtgtaaaagaaaagtccctccaaacatcgaaggactttttgaaaagcaatgcactacgctctcttttgccatacgacaaggcagcgagccacctgaattgaaaattcaaaaccttaatttgaaaattgcttcttcaattaaatttattgtagtgtaaaggagaaaaaaagtgaagagattagaacaaactttgaataagcaggttaaatatatacctcatggatatcatattatgcgaagaagagatcaaagattagaaagataaataataagaaagagcagctaatcaaaaactaactgctaatttaatgtaaaaaagaagcacataccgcttgcgtatgtgccgctccaaaaacaaggattattaattaaatagtgctaaaattgtaagtaatctaactaaacggaaagtaagtgagaacaaatgattgaaaacctagaccttgcaaacttcatagtctcttttggtagtatgaatgactacagtagtactgtgttgcaaacaaaaagagccttagatcttaatgacctatctaagcttgtacatcaacaccacgatggtgccatcttaaaagatgctttagatggcatagctgcagcaaagaaattcggatttacaagacaaggaattattgaaattaataaagcctttacccatagcgaagaagaagacccaagtattccagggcgcttaagacatgcaagttataatccagacgacgcaattgtcattatcacagaccctaaaggcacagctaaaggtgcatactttgctccagaaaacgtctaccccgaagacttagatgaaataattgaacaatacaactcgtctaaacagactactaaagatgcgtggagagtatttgcaagcttatccaagcttcaaccattccaggacggaaataaaagaacagcgctaattgccgcaaactctgctcgagatacctgggaaaccagagattatttaacccttccttttgacaacatagaccacgctgaatttatgattagcctcatgagattttatcgtgcagatactagagaacaagaagacaaagctttggaccgaatgatagaaactttacctagcaagaacgaagttgcgtatcatttgagcaacgaaatttcgcaaaaagatattgacattaatgacctaaaaactaaaagaattaaatcattctaccaaaatcaagaattagataggtaacattaaagaatcgcaccaaggcttaaatagagagactgtaaaatagtttgtgtaaggatgaatatttccttaattttatttccctgaatattagaaaaaggaatccttttcccgtatgattgatttgaacgaaaaacatactagaaaagagattccttcatgaatgattttaccaaaaatatgacacaagctctattcaatcaagacaaaataaacgatttattgcgtaaagaactccaacaagcagttaatgatctattagaagctgaattaaccgcatttttaggttatgatccttatgatagagctggttggaataccggtaattctcgcaatggtgcttatttccgtaaagttgatacacaatttggcgagattgaaattcaggtgcctagggaccgcaacggcatgtttcatcagcacacgctgcctgactacaagcagcactcggatatcttggaaagcatgattatcaagctttactccaagggcgtgaccaccagggaaatagccgatctaattgaaaagatgtatggcagccattacagtccagctcaggtatcaaatatttccaagcagatgattccaaaggttgaggcttaccacaaacgcaagctaagcgacaagtttttctgcgtctatttggatgcgacataccttcctttgcgccgagaaacatttgagcgtgaagcagtctatattgccattggcatcaagcctaatgggcacaaggaggtcattgactactgcattgcgcctagcgagaacattgaagtctggacagatatgcttcaaaacatgaaatcccgaggcttaaagcaagttgagctttttctttctgatggtgttgttggcatgaaaacagccttggccaggacttatcctaaagctcattttcaacgctgtttggttcatgtcatgcgcaatatctgcgctaaagtacgcgtcgacgatcgtgaaaagatcatgaacgaattcaaacaggtgcatcaacagacaaacaaagaagaagccacagctgtcctgcatgacttctataccaaatggggcaaggtttacagccatgttatcagaagcttgaaagacatagaaccagatctgctggtcttttataactatcccaagcagatcagagcttcaatttattcgactaacatgattgaatcatttaacaatgtgatcaagcgcaaagctaagcctaaagcagagtttccaaatgaacagtcgcttgatacttttattggcattcaagcaatgagctacaacgaacgctatttcaatcgaatccacaaaggctttggtcaggttcaggataccttagaatcctactttgattaaataaaagattaaaaaatcaatctacgagaaaaatctatttacacaaaagatttgacagtttctaaatagatggtataaaaaacgctgaaatcattgaattatcaaaacttcagcgttttttattctcagctaagacagtaaattatcttcagcagaaacgtgtaaatttaaaattactagaaagaaggtgatagtagtaaaaactaaataacttgtatgtagtcaggacacttcattatgaagcgtcttttttgttttcttagaaaggaaaaattatgtcaacacgatcaaatgtatcaattttaaatccaaatggttcagttactactcagtattttcatatggatggtggacttactttcacaggacaaaatttactagataattatcgtactttagacgatgccaaaaagttaattgaaacagggaactataacgataaccatattccagaaaatcctacagctgctactaaacttatggatgaatataattctaatggaccaagaatcgatgatcctgttagaaaacagtatcatgacttatctgcgatgattaacgatatatcaaagaatgacggtaagtaccttaattcagatgtagagtatcattatcttttttcaccaagcgctgaaggaaattatcaatggcacacgattaatcgaaatggtattaagcccctaactcaaaaagttattgatagtgaaaaagaaagtggaactttagccgatgtagattggaataaatctagttttacttctgattgggcagcaccattaactgataaagagatatcgagtcttaatgatgatatttcacttcagtcataatatcttgatcgccttcaaaaatcaaaaccagaattagtatcaggtcaagttaaagataaaatggatatggataaaaatgctttaaagtctgaaagacgacctagaaagacttttgaccgtaaagcttggaaaaagaaacatactcaaaccgttgaggatttaaaaaatggactacttaaagaagtagataattatactcaatcaccagagaaagttgtagaaatgcttgattttatggataagtttcataactattcctcaagaaatgcaatgatgattcagatgcagcgcccaggtgcgactgcggtgggatcatttgcaaagtttaaaagcatgggctataaggtcaacagaggtgaaaaaggaattaaaatatttgttcctactaaagctacagttttctatcgtaaaaataaggatggcaacaaagaattagctaacttaaagactgccactaaagacgaaaaacaaaaaattgaggcgggtaatatagaaacttaccaaaaaactttttataagattggcactgtattcgatgctccacaaaccaatatgccaaaggaaaaatacccagaactttaccctaatagacaccaagattttaatatgaagaatccaggacagattgactccttagagaatggattaagaagtgtagctaatgacatgaaaatgccagtcattacttatgacccatttaatgcagatattcgggataaatataaggatccgcaaaatgctaagggatactttaacagggctactaacgaaattgtgttaaatggatacaacactccaacggagaatgtatcagtgcttgctcatgaattgggacatgcacagctacataatagccaaaaacaagaaaagggcctgcctagagaattaaaagagatgcaagcggagcttacaagttatctttattgttctcattatggaattgatgttaagcaagagacagttgattatatagctaattggacaagcaacggacaaaagtttaatgagttaccaagtggggtaaaagggcaaattttgacgcatgttggttcagctactaagacactaactaatagtaccgataagttactcgaaaaagaacaagaaaaattgggtcaaattgtcaaggaaaacttcttagatactcctgaacactcgcaatggtatgtgcaaaaagaaaaaatggagcaagaagttactgacaatgagactaatggaactaattttaagaccgaattgacggcactaagaaaaatcgaaaaaagtatgacaatagatacagttagaaatttggatgatgcatttaataaaacgcagtgctggacagcagatggcaactatagcaagttaaccgacaatttacaaaatgaaattgaaaaaaatcaagaaaagtctaaattgcttgatgataaagaagtgcaaactagcaagccacatgttgctacagtaaacagttcgctgaccaatgaaaaagcaaaagaaattgctattcaaaaaggtgaacaggaattggatcgttaaaaaatatcaaaaatgcaaaatttgatatgaggattgcaaagcagttagtaatttattgaacaagtggtgagaaatttttaaatattactcttatataggttgattccattgatttagtagtataatatcagtataaatgatatgaggggtgcactactatggcttcaattactaaaaagagaattcaagtacaaattgatgatggtgtggtagaagaaggcaatgctgttctaaaaaaattaggtttaacacctactattgctatcacaatgttctataagcgtcttattgctgagaatgggttaccattttcaaccaatttaactgaaagagagaaagatgaattagaaattcaaaacttaacaaaagattgggcaacagaagacctggatagccctgagaaactgcaagaatggatgtcaaaagatgagtaaaaatattgctacagtatatgttcgcttcgttcagatttcaggtggtaaaagacgaccaatattcatattacaagaaaatgaggataagttctttttctttgacataacgacaaagtttaagaataaatccgaaaaaattaaaaagcattatttcgaaataaaagaatatgaaactacaggtttgaaaaaacattcgtggattgatacttatagacgttattcggtatctaaaaaagatactaatgttaattatataggtagattaagtgatcaagacacacatagattagttaagtttcttcgtaaaaccgctaaaaaataattttatgttaaaacagccagctttaaagttattgtatttagagctggctgttttttgcgtgtttataattagtatatatgttacttatgcttaatatataagcaacaatatataatctggtgccttatttttttagttagtgcaatatcgtatactataaattcaatatatgatataaatgagatgcttatattatggtaaggagaaataataggcagttatgaaagaagtcacaagattagaagatatattgttcaacgttgttagacctaataaagaaggggaattacgaggtttgtttaattcctattatgtgattgatttagttaaaccagctcaacttaacagaattgataatttagttgtgatcaaaaagaaattaattaattatggttttgacgtaaaaaaactaaagtatgatcaggcaagcgactttattacttatattaatcaagattggattaaaaattatggttatgtaattagtgataagatttatcaaaaagaaaaggaaagattagaaaataagggaatcgacttttattggtattctaagtacctcaattgtaacaatgatcaacaattgtacaactactttagaaagataattagtcaaatgaataaagttattttggaaagcattaagcaggtttactaagcttttaaatattataaaaatgatatataatatagttacctccattaattaatttttttgaataatgagtatgctatgtgaagaataccgtgaggtattctttttttgtagaaaggaatagtaacgtgacaagattacttattttaaatgaaaaaaagtctcaagcagaaaaatttgcggattatttaggtggaatgagtggcgaatttgaaggaaatccctatgatattgtttatgccgcaggacatttattacaactcaatgcgcctaatgaaatggttgaccccaaccttgcagctaaatatgcggattggcagaatttagataactttccttggaatcctctcgatttaaattggtcaaagcaagttattaagtccaagcaaagatacattgataatattaagagcaatttgcctggacatgatgtaattattattgcaagcgataatgacccgtctggtgaaggtgatgtattaggttgggaaatagtagattatttaaactggcaaaatgaagtctggcgaattcgttttaaaggtgatgactcagctaactatgtaattgattccttacataagcctgagaaggctacagttagtgaacaagatgctcaaggaattttagtaaaaggaaaatcacgacagagatttgattttctaacaggattagaagaatcaagaattgctactgaattggcaagagaacaaggctttagcaacaagggcaaggctctttcaattggacgcttgcagacgtatattacatgcttagttgatgaacaaaatagagcaagaaaggcatacgttaaaaagcctttctatgaaataagatataaggatgtaaatggcaatacgtttaagcgtgactatcaaaacggagacagctggcgtttttcagataaaagtttagcagaacaagatttagtaaattatgcaacagatcaaattattattgatagcacaactgaaaaaagaacccagccgcctaagttagtcaacttggctgacttgggtaagattttccaaaaggaatatacaactgaacaaattaccgagacttatcaaaaaatgtatgatgataagattgtttcttatccgagaacagaagacaacgcaattacgattgatgattttaacgagttactaccatatgcagataaaattgcagcagtcgttggaattgattcaaaactcttaagtcataaagacccacgcaaaaaattcataattaagagtgaggatcacggagccaatcgtccgaccaaattagtaccacaatcacttgaaaaagttgaagacaaatatggtaaatgtggtcgagatatttatgaacgagttgctaaatcatatctagcaatgttagctgaggattatgtatatactcaagttaaagcccatattgcaaaccatcctgattttacgagtacgattaatgttcctaaggaactaaactataagctgatttttaacgaaaatgatttaaatgaagaaaagcaatcagaaaataaggctacacattttgctcaaaacgctagccctgaagtatatcaaggtacaaatacgccaccaactaaacctactttaactttcattttgaataacttggataaatggaacttgggtactggcgcgactaaaatgcaaacaatcagtaaattacaagcaattggtaaagaaaataaaaaggtcattccccaattaaaagtagtaagaggtgtttttgaagtaacaggaactggcgcattgattgcttgcttagctaaagatacctatttgtcttcaggaaaaattacaaaacgcttgcaagacattttgaatgaaattaaggctgatcccacaaagcaacatatggtctactcagttgcagaaaagacaattgaacatgataaagcagttatgatagaaaatgccccattattaaagcaagatacacaagttaaaaaattagctggtgatttaaaagcaattgaacgatttagcggagtctttactcaaacaaatgaaacagtaaacccaccagttacgatttttgatggacatacgactactgaagtggagcaacaagaagctttagaagggaaacaaatcacctattcgattgaaaaatttggtaaagaagaacaacatacggcttatttagccgaacaaacgtataaaagtaaaaaaacgggtaaagagattaccagagttggttggaaagtagagtttcctgaagatactgatcacgttaaaggaatctataagcctttagctaaagagattaaatttaaaaaagaatatggacaacatgtttttagtgaggaagaaattaccagcttgttggcaggtgaagaaatcagttttgaagcgactgataagcaaggaaaaagctttacggctactggaaaattgatagaacaagaattgaaagaaggtagacgtaaaatcaggttctggggctttagagttaatcctaaacctgtagatacaaatgtctatgtagtgattacatataaagacggtaaagaatatcattttaagaaaacatatcgaggtcatcgttggacccctgaagagattaaaaaaattgcggcgggaaaaaagcaaattgtaactttcaatggtcgtaaaggtacctatcgaatggagattaagcctaatcccaataagaaatacaatggtagaaaatattttggttttgatgataaatttgctaagtagaggtagtttatgaaaataaatatgattttgtcctttctaagacgaacagcactgtttattgcaactatgtttgcattttttgtttctgctaacgcaggtgctttggcgcaatcaatttgcaaggtttctacgaagcatttaaattccaatattaattttgcgacggtcggctttggtatttcagtaataatttatatttttctcttgtcgatagggtatctaaaatcagacataaaaaaatcaaaggaactaaaagatgaaaaaaaagattcttgataaatcaattggtattggtcaaatgatagtaactttccttatttatgcggtagttcaaggattatttatgattagagccaaacaattaagctgggttgccgttatatttatatttggattaacggttgcattactgagcttgacctacggaatttaccaaagaagacttaatcaggtgaatgattggcactttactagttacaataaaactagaatgccaagatttactttaaaaaattggagtttagcttttcttggatttttagtaatttgtattttgcaaattttagcaggatttttgattaaaggggaagccactaatcaagcaaacatagctgcacatcagcaacagttgaatccaattattaatataatgctgattgcaattggaccactttttgaagaaattatttttagaggtatttttttcaattggttttttagtaaaccaggcaaaaaatcaacattgtttattgctgttctcattaatggattaatttttggacttttacatgaaccacaaattgatttatataccattttgtactcactatgtgggtctgtcttagctttagtttatcttgaaactaaggatttgaccttctcttacgtaagtcaccttggcaataatttagccgtgttcttgataagcagtttataggagaaagtatatgaagaaagacgagtatgaaaaagccgcaaaagctcttttaattgaaagccattataagctggtggatgagaatataaaatggatgcttcattcgcttaggattagaacaaagcgtctaatgatatatcgaaaatgcagtgagcaaaaagcgcttaatgaaattgtacaaataacttcaggtgctttcagtaccgaggactttagacaatattatgatagccacttgatttcgtgataacatacagctaaagcattaaacatatttgctctaaactttggtgaaacaaaaaatcgttactcatttgtggacttagagtagcgatttttgtgtgtcttaattttttcgcatatgcaagatgtttcttcttttgtaccttcatattaccatgattttttattttttctagacttagtgccctttctgccgactttccaataggattcacaaatttagttttaaatatagacccaatgcctaagatcctaaaaaccatttagtatggcaaactattgttgacatgctatataataaaaaaagttaaaatattgacattcacgttataacatcgtattattgcgttataacaattaaatggcaaagcaggtgattaaaatgttacaagatacaactaaagtttttaaagctggtaattcattgagtgtacgtttaaccaagcaagatttaactaagtttcatgtagaagatggaacagttcttgaaaaagaatatgatcctaatggtaagaagatcacgtttaaaatagttgattcaattaatcccaatttggacaactttattgatcaattttatgaagaaaataaagaattaacacgagagttagagaataaatgatctatttaaccaaaacagatttaatccatttgaatcaacggttgcttgaaaaagctggtaaaggtactgtaggtgtgcagtatccagaggggttagacgttgttgttaaacagccacaacaaatattatttggacgtgaattatatccaacattatggttaaaagcggcttttatcttacagaagattactaaaaagcatatcttcgctgatggaaataaacggacttcctattatgcagcggcgttttttttacaagaaaatggatatcacttaaaagctgataaagacgatgcattaaagtttattttatatattactaatagtgaggattcagaagagaatatgtattttgctgcagattggttaaaggtgcattgcgtcaagattaagtaagtatattagcaattagaattaataaaatgtaaaagttgatttttgctcaaaatagccataggcgtaaaatccataagcaaaactcaagaaaacatcacaagcgtcactatccttagccaatgcatatagcttttttgttttaaactttggtgaaacaaaaaaatcgttactcatttgtggacttagagtagcgatttttgtgtgtcttaattttctcgcatatgcaagatgtttcttcttttgtactttcatatattaccatacgcgtggtgctagttaaatcgttctaggcaatatgcaatattgtaagccaaaatcgcaacttcaagtctttcttgaaaacctgctaagcttcttgctcggttgttctcagagttgtagtaagataataacgaaaagtcgctctcaatcgttcttctgagtgccattaaatattggttattgtgctttcgagcatttttcatattctttcgataaggtgtccaaagtaagtatcccatctgcatcaattgttgatgcagttctttacctaaatagccttcatcagctaaaagataatggtttttaggtcgagcattggcaattaattctattgtttcttttgcatcatgaattgaagccttggttaccacataatctagcaggtagccatcaccgctaacaatagcgtgaaccttaaaaccataatagtagatttgtttagtagcttttcggcatagccacgaaaaatcttcgcacgatgattacgaactggctgacagaatggtactggaaaactatcgataattaaaatgcgatctgataaatcaacttcttcattaagagcatgacggatttgataaattaatggcaaaagcatgcgtgctctacgattaaagcgagagtgagacagactagaaaagtgctcacagaatcttctttgagattcaatgcctagggtagcttgccagataagcaaagccaaaatggaactatcagatattttgcattgatcaatgtttcgccgatgtttcaatgaattttgagcataaagtttgtatatcaaacggcaaattgtattcaaacgactaaaattaacttgtgttaggatgagaaaaacgcttaagcttagggtagttcaatctagttagactcttttctattaatatgtttacaagtcgagtctaacaagattggactttttttgttaactaaaacaatttaactagcaccacgcgtattttattgtatgagactggtgaaatagattatcagcctgtaggtaacaaaatctctggaggaaaaatgactaattttgttcttgctgctattaaagcatgtaatgactttctacaaaaagaaaaacttaatctatgacaagtaataatcttggcaatgcaagaagatttagcaaataaacggcatagatttaaaagaaggcttcaaaatgattaaagacgtattttcaatagaaatggctgtaaatgcatatattattggccattttgaaataaatcatcttagctggttcaaaatgtgtaatttagtagatcaatctaaaatagtcgaacgatacctgcttaatggcgaaatattaaagattgatttagttgaaatagctaataaaaaaggaagaaataataacaggtgcggacaatattattgcaatttctgattttattcataataatttcgaattaattaatttacaggagcattcagaattaatggttatagattttgtaatttaccattaaaactgcaaaggcaaatgtgtaatagaatagtacaaatttcacaagagcaataaaactgcaagttatgcatgcaaaaggggtgcagaacttgcagttatttatttggctaattgaactatttataaaagcggttttattttactatgaatgtgatgaatgaagtgggaagtgaaataagattgagttttgtaaaagatggtttagtatttgcacaattagatgttagtgattctaccgatgctatttctacattagctgatcagttattcaagcaaggttttgtgactgaaagctataagcaagctgttttagatcgagaagagatttttccaacaggtttgccaagcggtgaaggtggcgtagcaatcccacatactgatgttaagtatgtgaataagccagttattgcatttgctacattgaaaaagccagtgtttttcaaaaatatggctgataaatcaaaagatgttgaagttagatttgtagcaatgctagctatgaaagaaccacatagtcaagtgcaactattgcaaaagcttatggaaatgttccaagaacaagaactaatgtcaaagcttgtggaatataaagattcaaaagaattatatgatgcattagcatcgtactttaactaaaagggagtggaattaaatgaaatatgtagttgattttatccagtatatagtcaacttgggaccaacagtaatgattccaattatctttttgatttttgggttatgtttgaaggtaccttttgctaaagcacttcgaggcggcttaatggtcggaatcggctttataggattaaatgcaactgttacaatattaactgatgttatgaatccagcagttcaagaaatcattaaagtcatgcatatcaatttgtcagttattgatgttggttggccttcagcatctgcaattgcatatggttcaattgtaggtgttacaatgattccattgggtatcattatcaacatgattatgctgtttaccaaaacaacatcaaccattgatattgatatttgggacttttggcactttgcttttacaggttcattagtatatgccttgactgatgacattttgcttagtcttttcttagcaagtgtaaacatggtcgtaatcatggtaattgccgacagaactgcacctttgtctgaaaagtacttaggattaccaggaatctcaattcctcatggatatgcaggttcttttgtaccatttgccgtagtaattaattggattattgataagatccctggtgttaacaagattcacttggatgctaaagactttaacaagaagtttggtaactggggtgaacctacacttttaggtttcgtaattggtttgttagttggattcttagcatatggctttgttccgggtatggattggccagacaaaataggtaagattttgttaatgggtgtaactatgtcagccgttatgattatcaccccaaaaatggctgcattattattacaaggtgttgtaccagtatctaataatattcaaaaattgactcaaaaacgctttggtggtagaaaattctacatcggtatggatactgcagtaggtatcggtagtccagttgtattggcttgtgctaccttaatgattccattatctttggtatttgccttcattttaccaggcaataaattcttaccaaccattggacttgttggatttgtcttcatgttcccattgattgtggcagtaacacacggcgacttcttccgttcctttattattggtgcaattaacgtaatcattggtttgtggattggtactaacttatcaccattctttactaaggctgctagagctgctcactttgctattccaaagaactcaacattaattggatcaattgactatgaatctaatcctttcccatggatattgttccaaatggcacacaataagtggcttgcctatgttattggtattgtagtttgtggtatcttagtaatgtggaaccgtcactgcattattaaggctgaaaaagaagctgaagcagctaaaaaagcttaataaagttaggaggatttaattatgaaaaagattattgtcgcatgtggcgctggtgttgttactagtacagcagccatgaataagttaaacgaagagctaactgatagaggctttaacgaaggtactgattacaaattagttcaaacaagtgtacaacaagtacaatcaatggcagatgaagcagatgctgctattactactactcaatatgacaatgatgaaatcaagattccagttttaaatggcttgccattattgacaggaattggcgtagatgacgttattgatcaagtagaagaaattatcaaaggttagtttaaagagttagaaatcgttaaggcaagtattttagatattgtcttaacgatttttttaggatatggataatagatggaatcaattgacacccgcaatttaattaattattttgctgagcaaaaaagatatgtgacgttagatgaattatgtaactatttcgatgtctcacaacgaacaatcttttatcggataaaaaaggctaatgctttattaacatcaaaagatattacccctataaaaaatgttagaaatttaggctatatactcaatgcacaagctataagtgcttggaagcaacaaaacatcaatgaaaataagaaccttcaacataacgaaaataaacaaaacagattgaaggaaattatctggaaattttttattcagaatagtccaataactattaatcaattaatcgatgatatggatgtttctagaaatacgataataaatgatttgaaggacattcgacaaaattattctgaactaaagctaaatattgactcaaatggtcatctactaaaaagttctgaagaagagaaaagtcgttttattttcaatgagctgcaaaaacataatagtggattaatagcacacaaaatagataagttaccatttccaattattgaagattcaaaagtaaaaagtgatatagaaattctcgaggaagatatttcctcacgatttaccgaaaacgctatttctaaattaaagagaattcttaaatttagaatatggcgaatttctatgggaaatatgattgttgacatagatataacagataatgatattcaagagagtacagttaatgttttatctgcagttacagactttacgcaaagatatgggattggaattaaaagtgaaattttattttttagtgaattaattctttgctcgcaagccgacgcagttaattacgttacagaatcttttaaagacaaaattttagatgtagcgcaagacattgttaatagatacgcttctatttcaggcataaaaattcaatctccaaagtttgtaatagccttaagtaatcacttatatgccagttattttagaagtaagtttaattttgactttaattctgaagctttatctgatgttgtccataaattcccagaaatggttaagtttgtacaattatcttgtagtccattagctaagctgttttctaaacctatttcaattaatgaaattgctttgatcagtctgtacttcatttcatacgatgatctatcagataatatatctcatgttttagatagaaacgataatattagagatagcttgcaatcggaagttctcttagtatgtactagtggcgtaagttcatctgctattctttattctaatttgcacaaacaatatccattaatcacattttctaagtcactaagtatcgatgaattaaataaaattttacgcatccctaatacagctaaattaatcattacaacctctccattaaatacaaaaaatattgatttacctgtagtccaagttaaggcaatgatggacagtgaggatcatgtaaaagttgagaatcaattaagatactatttccctcagttattcattaatagagaaaagactttagataatttgattagcattattcaaagaaatgctcaaataaagaatatttctaatctaagaaaagatttagataattatctatatcctacaaaagatactgttaaacgtgataaaaataaacacaatttgatggatcttctgaatagaagtagtataaaaatcattgacaatctaatgaatggaacggatttgaatcctattattaaggagctatctgaagagttagaaaaaaagaatatagttacctctggttattgtgatgatatcttgagtttaattgataaatatggcccatatatgttgctttcatctgatacattcttagcgcacgcagcaccatctaagcatacaagaaaaatggaaattgaaattggaattctaaaaagacctattaaaatttccgttaataatatagaagaaaaaataaagtgtgtcattgtacttgttcctggctttcaccatgagcatgataaggcactaacacagttaattaacattattactaatcgtagattatatgatcagattttaagcgaaactgatacagataaaatgtataaactaataaaaaactcagttcagtgagatagaaagtggttcaatcatgttagaagatttaaaaaaagaagtttatgaagccaatatgcaattgcctaagttaggactagtaacctttacttggggtaacgtatctggaattgatcgtgaaaagggtctatttgtcattaagacatcaggtgttccatatgaagaattaactcctgacgatatggtagttgttaacttgaagggtgaagtagtggagggaacaagaaatccatcttcagataccccaactcatacgtatctgtataatcatttccctaaaattggtggtattgtccatacccattcaccttgggctgtatcttttgccgcagctaaaatggatattccagcaatgaacacaacccatgcagatactttctataccgatatacctgctgcagatgccttaactaaggaacaaattgaagaagattatgaaggtaatacaggtgttactatcgtaaagacttttgaagagcgtcatttagattatgaagcaactccaggcaccttagtttcccagcacggaccatttacctggggagaaacacctgctaaggcagtatataatgcaaaagtgttagaagtcgtagcagaagaggacttccatacattagaattaacccacgctaatagtcatttaccacaatacttgcttgataagcactattatcgtaagcatggtgagaatgcatattatggtcaaaacaatgctcattcacaagaccatgctaagcgtatctaaataaacttatataatacgcgtggtgctagttaaatcgttctagacaatatgccatattataagctaaaatggcaacttcgagtctctcttgaaaatctgctaaacttctagctcgattattttcagcgttgtagtaagacaaaagcgaaaaatcactctcgatggtccttctgagtgccattaaatagtgcttattgtgcttttgagcattcttcatgtttttacgatatggtgtccaaagcgtatagcccatttgctctaagcgttgatgcaggtttttgcccaaatatccttcatcgcccaaaaggtaacgattgtcaggatgagcgttagtaatcagttctactgtttccttagcatcatgaactgaggccttggttacgatataatctagcaagtagccgtcgtcgctaacaatagcgtgaaccttaaaaccataataatagatttttttggttgccttatagctaatatcggcatagccgcgaaagatcttggctcgacgattgcgaattggctgacagactggcacaggaaagctatcaataatcaaaatgtcgcctgacagatctacttcctcattaaggccatgtcgaattaaatagatcaatggcaaaagcatgcgtgctctgcgattaaagcgagagtgagataaattaacaagcttttcacaaaatcttctttgagattcaacgcccaataaagcctgccaaataagcaaggccagaatagaactgtcagatattttacatcgattgatattccgtctttgctttaatgcatctggggcataaagtttgtacaaacagcgataaattatatttaaacaactaaaactaacttgtgttaggatgagaaaaacgcttaagcttagggtagttcaatctagtcagactcttttctattaatatgtttacaagtcgagtctaacaagattggactttttttgttaactaaaacaatttaactagcaccacgcgtattaccatgattttttattttttctacacttagtgttgtttctgacggcttttcaataggattcacaaatttagttttaaataaagatcaaatgcctaagatcctaaaaaccatttagtatggcaaactattgttgacatgctatataataaaaaaagtaaaatcatatagctagtggaattgcccataaaaaagggtattagataaattaattgaagaaacgcaggaataacaccaaacagaattagctaaaaagttacatacaattcaatcaaccattgcaagaattgaacaggagaataaaatgatcacatcacatcaattatgggcaaataattcatttgtcaacatttacgcactgcatgcaacaaaaggcggtgcgataaatggttagatcaattgaagaaaaagtagaagaatactttaagagtgaacttgatagtctaggaattaggcattacggtaaaactggagaaataaatagtgaaattacatcagccttgcgacaagctgaatctaaatctggtggtgcaggcaacaattatcctgatattcaattattattagaagataatcattcacgaagagtaccagtaatgattgaagctaaaggtggcaaaaataagttagaaaaattagacaaggctggtcaaattgttcaagtgactaaatttggttcagattctaagccgaacgcaaaaaatccacataaaaaaggtgatcctaattatagtgcaattactacatatgctactaatggtgctctgcattatggaaatgcgatcttagataactcagactgtgatgaagttatcataatgggaattaatggtactactttagatactgaaggcaatttaaaagatcctgagcagaaagcttattatatttctaaggctaatgctggtgttccaaaacatattagacagctagattcatcgtttgatttgtttaagcaaatcaatatagataccctttttggcatattagacaaactaaatctaaatgaccatgaactcgaaaaaattaaattagaaactgaggatgaattagaaaaaaggataaaatcaattcatcaagctttgtacgacgataagtcaattcaaaacctactgacaactaatgaaaaattgtatgtttttactggtttaatcatggcggggctacagacaaaaggagtatcacagttagagcctgctgaattaaaaggaaatataactgaaagaaacaatgatggacaaattatcttaaatcatattgcagatttcctaaatgcaagaaaagcggaaaatagcaaaattaacatgattatggctttgttacaacctatttttactaaacaagctttatggcaacctaaaaatggtgaaagtttgattcataagatatatgtgcaagtctataatgatatacttcctttgcttgaatcaaatttgcatttagattttactggtaaaattttgaactctctaaatgattgggtatcaattgataatgaccgtcaaaatgatgtggttttaacaccaagatacataacgaatatgatggctaggttagctcatacaaataaagattcgtttgtgtgggatttggcaatgggatctgcaggatttttagtgtctgcaatggatattatggttaaggatgctaaaaatacaattcaagataaacagaaactagagtgcaagattcaaaatattaaagaaaatcaattactgggtgtagaaatactgggcaatatttacattttagccgttttaaacatgatcctaatgggagatggatctagcaatatggttaatggtaatagtcatgagctgtataaaaattacacacagtttccagcaaatgtgtttttgctaaatcctccatactctgcagaaggaaaaggttttatttttgttcaagaagcattgtcacaaatgacaaaaggctatgcggcaattattattcaagaaaacgctggtagtggcaacgggctgccttacacaaaaaatattcttaaaaataatactttagttgcctctattcatatgccaactgatttatttggtggaaaagctagtgttcagactgctatttatgtatttaaagtagctagaccacatgaagaagatgatttagtaaccttcttagattttagtgaagatggatatactagaatgaaccgtaaaaaatctggtcagaaggttaatttacgtgatacagatcatgccaaagaacgttatgaagaagtagttgcaattgttagtgataaaaagcctaaaacgaattactatactgaacgaaaccataaagtaattaaagatacaatcactctagaaggcaatgattggacttataaccagcatttaaaaattgacacaacacctgcagaagaggactttaaaaggactgtggcagattatctatcgtggaaggttagtcaagttataggtggtcagaatggttaagtataaggaatttaaattaggtgatttatttgaaatacaaaaggtaaaaggtatcaacaagtctaaattagtaaatcctaatataagtacaaatgaatatgactatgttacccgaacatctttgaataatggcattgaaagcacaacagactttgtatgtgatgtcccctacaatgaacctaatacgtttagtttggggctgttacaaatgactttcttttatcgagaacgttcttggtatgcaggacagttcgtaaggaaaattattcccaaatttaaacttaatactaaaattgcgttgtactttaataccatttttagtagattgtctaaggtgttactgtctgttcttgttagacacgtggataatgtgtttagagactctaaggtgaggctacctgtaactgatgcagatgaaatagattttaattatatggaacaatatatagccgagcttgaacagcaacggctcgccgagcttgattcctatttaaaagctacaggattaaatgactatggactaactgatgaagacaagaaaatattagcatataagccaatatttcaagaatttaaaatagttgatctatttaatgtagttaatactcatagtatattgaagagtcaagtagctaaccttgaaaatggcaatgtgccatacttgacagcagcagaaggcaataatgctgttttaaaatacataaattgtcctaaagaatggatcgatgagggcaattgcgttttcattggtggaaaaactatggtagtaacttatcaagaaaaagatttttgttcgaatgatagtcataatttggcactatattttaaagattcaagatataaaagccctctaattcaacaatattttgtaggaagtgttagaaaagctttatctaaaaaatatagttgggatgactccatttcaaaagccaaaataagaagtgatagtgtaagattaccagttgtaagtaatacaaaaaatttagactttaattacatggagaagtacattagagcaattgaaaaactgacgattgctgaggctgtaaagtataaggatagagaaattttaactactgaatcactaattaataaaatgtaaaagttgcgttttagcttaaaaagccctgtattacaggattttttcttaatgaagtagaagtttataaaatttttgttgtaatttgtagtacttaaagtagttctaccgtcctttttaaagtcttactactatgattttttcttttttctacatttagcattgtttttatcgatttttcaacatggtgagcggagttttaaaaagaataaaatctaaatttctaattcgtatatcaaaatacggatatatcaaaaatactgatatatccgtatttatatagtttatttttctttaccctcaaataggtctccatgatttccgattctcacaaatctaattattgaattggtcttgtgtggcttgtagatcactacaacatcgaccgttccttcacttaaatgataatcaaaatgaccactgtaattaccaccacgtttatctaacggatgaaggtcatagtcctttccgacttttcctttttgggttaactgaataactgtattcttaaaatcttttattaactctggatgttcttttttgaactttttgtagtcttttttaaattgtggctcgtatttgatagtgtacattagttctcatccaaagatttcattaaatcatcgacattagtaaaactaggcgaatcatctgtaaccaagccctcatctttggcatcagctagaagcattgctttttcggttgttttattaggaatttctggttcagtcaagatttcaaaaggaacttttttttgtaaaaccagttgtttagctgccattacaaagtatgcattcattgaaaggcctgcagcatctaaaatcttttgcatttttctctttaaatcgtcatcaagacggattgtagttgatgatgtcataacaatcactcctttacgctatgacatcattataacatacaaatgatgtcattatggtacaaataaagcttaaaaaatagaaggtgttagaaaacagcaattttatcttttttaattttacacttgaattcttataaaaataaaaacgatagttgttgaaatattgtaaatatgatatataatataaatataagttaaacataaataacttatacatagcatatgaatagaacctgtcaaatcttttgtgtaaatagttctttctcgcaaattgattttttaattatttattcaaaataagattctaaggtatcctgaacctgaccaaagcctttatgaattcggttgaaatagcggtcattgtagctcattgcctggatgccaataaatgcatcaagcgactgttcagttggaaattctgccttaggcttagctttacgcttgatgacgttgttaaaggattcaatcatattggttgaataaattgaagctctgatttgtttgggataattgtagaagaccagcagatcgggctcaatttccttcaaacctttgatgacattgctataagctttattccatctggcatagaatttgtgcaagacagctgcagcttcttttttgcttgtctgttgatgtatctgcttgaattcgttcatgatcttttcgcggtcatccacccggactttagcacagatattgcgcatgacatgaaccaggcagcgttgaaaatgagctttaggataagtcctggccaaggctgttttcatgccaacaacaccatcagaaagaaagagttcaacttgcttcaagcctctggacttcatgttttgaagcatctctgtccagacttcaatgttctcactaggagcaatgcagtagtcaatgacttccttatgtccattaggtttaatgccaatggcaatatatactgcttcacgctcaaacgtttctcggcgcaaaggaaggtatgtcgcatccaaatagacacagaaaaacttgtcgcttagcttgcgcttgtgataagcctcaaccttggggagcatctgcttggaaatatttgatacttgagctggactataatgactgccatacattttctcaatcaagtcagcgatttctctggtagttacgcctttggagtagagcttgataatcgtgctttccaaaacatcagagtgctgcttgtagtcaggcagcgtgtgctgatgaaactgaccgttgcggtctcgaggcacttgcacttcaattggtccaaactgggtatcaaccttgcggaaataagcaccatttctagaattgccagtattccagccatttctggcatagggatcatagcctagaaaggcagtcaactcagcttctagcaagttattaacagcctgttgtagctctttgcgcaataaatcatttattttgtctggattgaatagagcttgagcaaaatctttggtaaaatcattcatgaaggagttcttctttctgtatgtgtttttttgttcaaaccaatcatacgagaaaggaactcctttttctaatgtttaaagaaataaatttaaggaatcattcatccttacacaaactattttacggtctcccattacaaataatgtataaagcaaatatacattaaatataaactaagtatatgtaatgtataaataaaatatgaggtaatgctaatgaaagtatatacatcgagtggcgtatacgagatcaaagaacatagggtaaaaattttcccgagctattttgaagcacaagtaaataactctaaaaattttgaaattagaaaaaatgatcgtaattatcaagtaggtgatttactcttgctagaagaatatgatccaacaacagaaaattacacagggcgtgaggttcattgcttgatcacttatatgacgacttttaaacaagcgccaggatatgttgttttgggtaccaagaaattaggtatagtacagtaatgattaagggggattttttctatgagttttaacccaaatcaaggcaaaaagtttgcagaagtattgaaggaaacacctagagttaatgatgactctggtaaggaaatatcttctaaagaatcaagtaattatattaaaacttaaacttcccacacgcaaaattgcttgtttcattgtgattctgcgtgttttgacaaatataaaaggcacaagtccttttcattgctataattatattgaccaaaacataatttatttgcatgaaaggcttgtgccaatgtctattttaccatctcctgaccaacaaaatgaacaactattttcaaactcaatcatcagcttcatcaagaagtttcaggtgatcaagctgttgagaaaatgtggcttccgcaaggaaaaaggcattagcctgttcagcttgtttctttacgttttaagcaatgtctttcgtgaccgcagcttatatatgcagctgaaaatggatcattttcaagaaaatttttccaagaactcatattaccgttttatgcgcaacgttcacgtcaattggctccacttcaccacacttctgtctgcgcaaatcattaataaccacttgcgatctttgacttcagaaaaacgggctgattgctttgttgtcgatgattcctacttctctaggaccggcttcaagaaaacagaattagtcgcccaagtttttgaccatgtatcaatgacttacaagaaaggttttcgcatgatgaccctgggctggactgatggagcttctttcatgccaatcaattcagtgctgctgtcttctcagaagctacagaatatgattggcgaaaataaagtttttgatcagcgcaccattgctggccaaagacgtatgcttgcccggactaaaggcacagacgtgatggttaatttaatcgaccaagctatgaaagcaggtcatcaagccaagtacgtgctgtttgacagctggttctcaaatccacatcaaatcgtccagctcaagcaaaggaagctggatgtgattgccatggttaaggttagctccaaaatcaaatatgaatttgagggagaacgcaaaaacatcaaacagatttatcgcagctgtaaaaagcgatgcggccgttctcgctacctgctgtcaatcccagtcaaagtcggacgccaggacaaagacggtgctaaaatagatgcacggattgtctgcgttagaaaccgtgccaatcgcaaggattggctggcaatcatttgtaccgacatgtcgcttagcgaagatgaaattatccgcaactacggcaagcgttgggatattgaggtttttttcaaaacttgcaaaagttatctaaaactaagtacggaatatcatggcctgtcttacgatgctttgaccgctcatgttgccatagtttttactcgctacatgcttatgtcagttgccaagcgggacgatgaagatgaacgcacgctaggcgagctgttctattgcatgattgatgagctggcggacattacttttagccattccttgcaattgattactgatgcaatgctggccagcgtaaagcaagtctttcatgccagtgaagcacaaatagctgaattcacggctgactttatcaatcgtttacccaaatacatgcaaaaattgttaaagaaaactagcaaaaataatatagaagcctaaagccaagcaagatcaagagattactggcttatttagtgtgggaagtttaagttaaaagagaaaagagaagaccttacacttttagtttgatgccaagtgcaagaactaaattgacagagattgcaaaagaacatggatatagctcatcttctagtttcttgaatgatgtgattttgcaaggcaagttgtagacaatgaattctaacaacatatatttaaactatatgtattgttgtattaaaagtcattctagaatcaagtttcatagaatgacttttttgtattgggagctaagacaaagcttctaagtctgaattttattgttagccagggtatccaaaaaggtatccaacttcaaaattaactaaaaccaacaaacatcaaaatggcttaatttcagtacttagaagtaattaaaagtaactaaaagtaaagatagctcccctcatctccatagataaccgttctagatgttgttctagagcggttttttgttttgctaaatcgtttatctgctatgcatttttgttatgcattatcactaaaaataagtattaaacattgcatgaaagaaatcatataatgaatactgtcctaaaattaatgattattaaattaacaaaaaggtggaaacaattatggaatacaaaaataaatattttgcaggtgaaagaattctttatggattaactgatgcaatccttgatggtattacatttggcagtggtgaatctcccttaaaagaagctaaaaatatcagattaaagaattcaatttttaaatggaaatatccactttggtatgatgaaaatgtgaaagttgaaaataccacgtttgaaactatgtcacggtctggaatttggtataccaagaatatttcaattaaaaatagtgctttacaggcacctaaattattcagaaggacaagtcatattattttagataatgttcattttgctaacgcagaagaaacaatgtggacttgtaatgatattaagattaccaattctcaaattaatggtgattattttggtaaagatagccagaatatttatcttgatcacgtttccgttgtgggaaattatgtttttgatggtgcagaaaacattgaagttcataattcaacttttatctctaaagatgctttttggaattgcaataatgtcactatttacgattcaattattgatggtgaatatttagcttggaatactaacaacattacgttaattaattgtaaaattgaaagtgatcagggcttgaactacattgatcagcttgagattaagaatggttccttgattcatacagatttagcttttgaatatgtttctaatttagatgtggagcttaatacaaagattgatagtattaaaaacccaatttctggtaaaattacggtacctgagattggtactttgattatcgatccagataaggtagatccatctaaaaccgagcttgattgtccgaaaataggtacaaaaattgttcattctgatacgaaccaaacaccaaaggattagtgagatatatgcaatatgattttgaaaatgcaccagataggtcaaagactgattcagtaaagtgggatgtgaagtctgatgaattaccaatgtggattgccgatatggactttaagacggcacctgaaattatcgaggcaatgcaacaaaaattgacattaggtgcatttggttatgagttcccacaagcagattattttaatgctgtcgctgattggtatgaaacagaacataatcatcggccacaaacaaattggatgatttttactactggagtagtccctgctatttcatcaattgtacgccgtatttcacatattggtgataatgttttagtacaagagccagtttataatattttttataattccattttgaataatgggcgccatgttttgtcgagtgatttagctttcgatggtaaaagttattcgatcaactgggcagacttggaacaaaaattagctgagccgctaacgactttgatgattttttgtaacccacataatccagtaggaaaagtttggactagtgaagaagtacaaaaaattgcggatctttgtcaccaataccatgtaacattactatcggatgagatccatggtgatttggttagacaaggtccagattacacgccagccttttctgtaacaggtgaagcacaaaatagtgtgatttcactagtgtccccaagcaaaacttttaatgttgctgctcttcattctgctacggcaattgttcctaatgaaaatttgcgcaatatggttaaccgcggtttaaatagtgatgaagtagccgagcctaatttattggcgattccagcaacgattgcggcttatgagcaaggccatgattggcttaatgctttgaaaaaacagttaaagcaaaattttgcgtatgtgcagaattttattgaaaaaaacattcctgaagtacaaatcatttcgggcaatgcgacatatttgatgtggatcgatgtgcaaaagatcagtactgattcacaggaattagcagagttcattcgccaagaaactgggctgattatttcagctggtagtgtttatcgtggaaatggccatgattttattcgaattaatctagcttgtcctttgacgatggtcaaggatgggatgcaaagattagctacaggtattcgtaagtataacaagtagctttacatgtaaaacaaatagtatacatatatctaagaaaagggtttcatttattctgccttaaagtttatactttaattgaggtgatttaaatggaaccattatttttaaccccatactttaggccaaaaatttggggtggacgtaaattagatgatatttttcactatgatattccagaaggaaaagttggagaagcttggattatttcaggttacaaggatgacgcgtcaactgtaacagatgggccacttaagggaatgtcattgcgggatgtttacttgaagcatccggaattgtttggcaatcctaaggccaaggaatttccattattggtaaaattcctagatgctaatgataatttatcagttcaagtacacccggatgatgattatgctcgcaaagtagaaaatgattctggtaagactgagtcttggtatgtaatgcaagctgatccaggtgcttatattatttatggtcatcatgcaaaaagccgtgaagaattagctgatatgatccacaaaggcgaatgggataagctgctcagaaaagttccggttaaagcaggcgatttcttctatgtgccagcaggtacaattcatgctttaactaagggatgcttagtaattgaaactcaacagtcaagtgatgtaacttaccgcttgtatgactacgatcgtgtgggcaaggatggtaaaaagcgtgagcttcatactcaaaagtcaattgatgtgaccactgttccccatgttgatcctaagttagatgttaagactagccaagatcaagatgcagaaattaagacattggttgaaccaccactttcaccacacttttatttgtggcaaattgaccttgatggtacttggaagaccggcttaaaggatcatccatacctgttagtttccgttatcaaaggcgaaggaaaattagaagctgatggcaagtcatatgatttgaagatgggaactaatttaattattccaaatgagatgaagaatttcactttcactggtaaaatgagaatagttatgtctgcaccaggtgaggaataaccgtttaaatttatcagaattaggagtgagaaatcgtgatctatgtcgcttgtggcttagttatggtggcggtagggttgatttggctgattacgccagccaaaaggcccaaccgaatttatggctatttatcttatcttgcgcaagttaaccaggatagttttaagtttgctcagaaacgggcaagctggtattgtatcctgtttgggtttattcaagcactgttaggagtaatcattcactatttgaattgggatcgctattttctcatttggctgttaacattttatttatttatcttattgccaattgtttataccgaaaaaagtttgaaaacatttttgtctaaacgacatgaattgccacatgactatgtcgatcctgatcaagtgaagcataagagaacaaaaggatttagggattgataatgagtttgagaatattaatggtcgaagatgacacttccgtagctgaaatgatgggaatgtttttcaaaaaagaaggttggcaacaagacattgctgttgatggtgtcgaagccgtcgatatgtttaaaaagaacgcggataagtatgatctgattacgttagatttgaatttgccaaaaaaagatgggattcaagtagctaaagaggtacgggcaatttcgccgacagtgccaattattatgcttactgctcgtggcagtgaatcagatcaagtgttggggctaggtatcggagctgatgagtatgtcactaagccatttagcccaattgctttgattgcccgcattaaggctttgcatcgccgcgtgatgatggaagaagaaccagctcatactcaagaagataatcaagactatgagattacgaccgatcatttgaagatttcaaaaaatagacgagaagttttatttgataatcagccggtaatgggtttgacaccaaaagaatttgatttgctgtatacaatggcacaaaagcctaaacaagtcttttctcgtgaccaattactagaactagtttggggctatgagtattatggtgaagaaagaactgttgatgctcatattaaaaagcttcgacagaaattagagaaggttggtgccaaggtgatccaaactgtttggggcgtcggttacaagtttgatgattcgcaggtcaaataatgaaattaatttaccaaaatatgttgagtttcttactcattattgtgacaactatctcgattattggttactcagagattggttatgcgcgtaatcaagcttatacgcaaaactaccagcggatggaaagctatgctaattctttgggaaacttggcggaagctgatagccaaaatgggactgcattgcttagcaataacttcttgaatcaattagaatatgttcttcgtggtgatgatgctcatttacgtatttttaatgataaaaatgagcagatttatcccaaaacaaaggctagaattcagctttcacaagaagtttttactactttaaaaaatgggcaagagattagaattcaaaataatcataatgaaaattcaccgattagttcaactaaggatgcctacacgggggttttggttccatggatgaatggcaaaaatcttgttggcattgtttggataggatcgagagtaaagcatgttgagcgaccgattttaatggctaaacgcaatttgttgcgtgcattgttaattactgtagcggttggattgttgctgagctttattatttcttattattcaactaaacgaattaagcgattatcacgtgctacgcaaaaagttgcatcaggtaactttaatgtgcaaattgagcataaagatagcgatgaaattgatcaattggctgagaatttcaataaaatggtgcaggctttgaagcagtcgaacgaagaggttaaggctcaagaagagcgacgagaccaattcatggctgatgctgctcatgaaatgcggacgccattgacaacaattaatggcattctagagggcttgcaatacgatgctatcccagaggattctaaaccgaagtcaatcgcgttaatgcagcgcgaaactaaacgattaattcggttagtcaatgaaaatttggactatgaaaagattcgaaataatcaaattatgctggttaagactaactttaatgccacaattattctgcatgatttgaagtcgcaattaaaacaaaatgcaactaaagccaacgatgagctggttgtagaggcacctgatcagttgcctatttatgcagatcgtgaccgttttacccaggtaatggttaacttagttcaaaatgcgattcaattcactcatgatggcaaaattattatttcgggtaaacggatagagcatggaacacaattatcggttaaggataatggtattggcatgagcaagaatcagactaagtatatttttgaacgctttttcaaggctgatccatcgcgtgctcgaatgggaactggcgaatcaggcttgggacttgcgattgtttcttctttgattaagcaacatggtggcaaagtagaagtattttccgcaccaggtaaaggttccacattcaccgtgaccttttatgacaagggctatgaacagtttgtagctaaaaactaaaaaagaacgcacagtttttttgaaaggtctgtgcgttctttttagttattggtattttctgaactatttttgtttttcgtattctctttaatatttttaacgctgtcaggaacttgggtaatttcttgttttctatcttttagttcagcggcatcagtacggtaaagattagtagttgtaccgcgatgtctgctataaagcgaggtggaattgccagctaattcatttctgatagcgatcattttttgataattgacggaataatcaaattgggttggatcagcagggacaaagccagttggggtgtagaagcgtaacaaattgtggttgtttaataagtcagaatagtctaatgatgccttggccttttgtgctagctcagagatttcttttttctcttgaggagtaaaattaatgatttgtttaccgctaactcggtcataaacggtacctttgattcctttagcaccaactatgatatatctggagctgacaatggtcccattacgaaagacgatccaattttgtcttttaggcgaaagcatgtcgctaccgaattggacatagtttttattgttaataccgagcaaatgcatcagtgttggcaagacatcaatttcaccagcaatttcatgattaatttttcctttcaaattattggcatgaatcatgaatggaacacgctgcatttgaacattattgtaagtattccacgtgtcagagctttcaccaataattggtgctaaggtttcattttcagaattacttaacccatagtgatcaccataaatgactaccattgagtttttgtaaagaccagaagactttaagtagtggaaaaattcacgcaatgcctcatctaggtagtgggcagtttcaaagtaattgttgatagtttggtcggcagtgtttgtagtcttaaagttagggtccttgtcttctttatctaagttaaacggaatgtggttggttaccgtaatgaacttagcatagaaaggctgctgcatctgctctaaatatttaacgctttcggcaaaaagcagcttatcttttaacccatagccgcttgcatctttactttgggagctatagtaatttttatcaaagaaataattatagcccatatttttataaacatcatttcgattccaaaaactaccgacgttgccgtgaaagacagcggaagtatagccatcttgacgcaaaatttgcggtgcagcttgaaaggtgttttccgaacctaaagaagtgaataaagatccgtcgggaataccgtaagtactagtttctagcatgttttccgcgtcactggttctacctagaccaacttggtggtagaagttgttaaaactgagcgtatgtttattttgataaagtgaatttaggaacggcgtcacttctttgccattaaccttaagattaattaaaaattgctggaaactttctaagtggatgataatcacattgcgttttttctcaataccaaaatatgaggaagatggagcagcattttgttttttggtaaaagttaaaatctggttcaagtccgcagcgttggcatttttagtgacttgaacattttgcgcactcttgaagcaatcataagcagtaaaggtgtcaataccaaggtatttaacgacataggagcgatcaaaagtgttgcgcaataagcgcggacgagaggtttctgccaaaaaaatgttaagagttaggacaaatgcgcctactgaggtaatcgcaaatggggtggataagccgtaagatctttgatcaattttgattttatgaatgatcagtaaagtaacaataacgatcaaatcaatccagataataatatctgttggatgcagaagggcaacggtacttttacctagaccctgcgaaactttaccaacgttagacatcgttttaattgttaaaaagtccgaaaattgacgatagtagataatatttgcaaaaagcaatgccgtattggcaaagtctaaaattaacattgtgatgtaagagatcagcggtttaggaatataaaaaccgaagctgattaaaatgatggcggaccctacggggctgagccacataatgaaatgttgatacgggtcgctcaagcctaaattgaaatcaaaataagctgcaaaaatatatttcagccagaaacaaacaactaaaagggttaaaaagcccgttcgtgtttgaataaaactgataattttctttttttccatataatgctcctttaacatcttttaattttaatggttcacctcttttaaaacaataatttgctaagagttatcttttttttaagattttccagccgtgaaaataggtataatctataatgaatattttggaaagaggcaaagtatgctatttttgggcccactttatagttttttagctaaacagtatgcaactaatattaaccactttgcattagttaaattaaccttattagcgctggataaaacaatattttattttttaatttttgctgtattgcgcttaatttggcttcttttggtgcgccgcagaagatcaattaggtctgaagctagcgtttgggtcttttctttttacataatcttagttttgatgctgacaacttttagaaatacctactttccgtggcagcttgattttaatttctctaggccattgagtgatattaacttggtattcatgaaggaaacttggaaattagtctatgctcccagtcatttggatttcttttataattcttttggcaatgtcttgtgctttgtgccgtttggcatttttttccccattgttttttcaaaaagagcaacgtttttaaggacggtactgatggggatgctgttttcagtgggaattgagactctgcagtttttgctggtgacgggggttagcgatattgatgatgttttcttcaatacttgtggagcaatttggggttatgtgatttttaaaattgtcaaaaaagcctgaatgcgcttataatgtactggtatttataaatcaagattgttaaaataggtttgtgaaaaatattttatttagttaggaagcagatttatgagtttaattaaatttgatagtagtaaactaacacaatttgttcatgaaaatgaattaagcgaaatgcaagctatggttaacgctgctaacactgaacttcgcgatggaactggtgcaggtaacgatttccgtggttggcttaatttgccagttgactatgacaaggatgaatttgcccgcattaagaaggcagccaagaagattcaatcagattcagaagttttgatttgtattggtatcggtggttcttaccttggtgcccaagctgcaattgaattcttgaacagcaatttctatggcaaggaaaagaacggtatgccaactgttgtcttctgtggtaactcactttcaggctcatacctttatgacttgattgaatggttaggcgacaaggacttcagtgttaacgtaatttctaagtcaggtactactactgaaccatcagtagccttcagaatcttcaaggacaagttaatcaagaagtatggtaaggaagaagctgctaagagaatttacgcaactactgaccgtcaaaagggtgctttaaagactgaagctgatgcagaaggttacgaagaatttgtagttcctgatgatgttggtggtcgttacagtgttctttcagctgttggtttacttccaatcgctgcttcaggtgctgacattgacgaattgatgaagggtgctgcagacgcacgtgctgactacactgatactgatttgtcaaaggcaactccataccaatacgcagcacttcgtaacatcctttaccgtaagggttacactactgaaattgttgaaaactatgaaccaagtttaagaatgttcggtgaatggtgcaagcaattaatgggtgaatcagaaggtaaggatcaaaaaggtatttacccatcaagcgctaacttcactactgaccttcactcacttggtcaatacatccaagaaggtttacgtaatttatttgaaactgttatccgtgttgaaaatccacgtcatgatgttaagatcccaggcgatgaaaagaaccttgaccaacttaacttcttggaaggtaagagcttgaactacgtaaacgatcgtgcttatgaaggtgttgttttggctcacaccgatggtggtgttccagttatgactgttaacattccagaccaaagtgcacatactttaggttacatgatttacttcttcgaattagcaattgctatttcaggttacttgaacggtattaacccattcaaccaaccaggtgttgaagcttacaagcgtaacatgtttggtttacttaacaagccaggttacgaaaacttacacgacgatttagctaagcgtctttaatattagatatactcagcatatttgatagtatgcgtattaatataattagctgtgctaattaaagaaagaataggaaacaaaggttttttgctctttctttttttgtggaaaggatttttgtgtgaaagagaatactaaaaatgttttagcagtattatcagctgcgtttatgtcatttgtcggaattttgacggaaactagtttaaacgtcacttttcctacgatgatgaagcaatttggtgtcggtttggatataattcaatggacgacaacaggatatttattggcgattgcgattattatgatttgttcttcatatttgaatgaacgttttactgcgcggcaattgtttattgttgcttgcgttggttttatgattggaagcgtaattagtgctgtagcacctaattttcctattttattgttaggtcggctgatttcagctctaggtgcaggattaagtacaccgttgatgtttaacttagtaaccgaagttatgcctcgcgaaaaatggggcgtttacatgggaatcgccggcttagtagtagctatggcaccgactttgggaccagcatttggcggtatcactactttttatcttaactggcgctggatttttggttttgttacaatttttgcgatcattgtttttgttgccgggctatttgtagtcggtaagtatcatgaacaaactaaaaatagttttgattggctatcatttatcgttttagctatagcatttattactttgacattaggcgtaaatcaaattagtaatggatttgctaatcctttaatgtggattttattaattgtgactgcaattttaatttggttatttgttagattatctaaaaaatcatccaagaaattgttagatctagccgtatttaagcaaaaagcgtttgtttatggtgcgttagcttactttttattgcaatttaataatattggtatcagttttgtattgcctaactacatccaaattgtcggaaagcaaacatctttagttggtggtttgattttactatcaggtagtattattgcagggctactcaatccatattttggtagcctatatgataaaaaaggagctaaattgccactttatttaggtggcttcttaatggcgatcagctgcttgttatttgctatttggggcttaaatttgactgtgatgatgatcattattatttatggcatcatgatgttaggacacagaatgtcattttctaacacgctagctgaagctttaaaggtggaaaaaggagcattgcgcgccgatgcaaccgcagtttgtcagactagccagcaattagccggttctgtaggaacaactatcttagcagcaattatgtcgatctggcagaaaaaaggtgcaacgtcctacgcactagcgacagctcaaggtagtcaggcggccttttattttactttattaatggcattaatcattttaattagctactggaaaatgtttaaagcagaaaaataatatttgactagtacattagcgttaaaataagttataatactagacggatgatgaaatttagtgagagataaaaagacgactgacacacagccgtcttttttctataaattatattttggcgttttcgttgataaaactacggataattttttcgcgcatagctaagaaaacagtgttgtgtccagtcggatgaactcgattggtcaataaaattagaccagagcgtttgatgcgatcaagaataattaaagtaccagtaaaacccgtgtgcaaaatgatcggataattttgctttggatcaaaccgaaggtcccatccccaagagcgtggttttatgccttggggatttttattatcaaatagctggctgacagtcttttgactataaggtaaaatatcctttagtcctaaataaccttgggcgaaggtaactaagtcttgaagattggaaaataagccagcagaaccgcaatctattccaagttgtctagctttaggatcatgtggaataccttgcaagacatggccatcaactagggcagtaggcacgcaatcatctttttgtggtgaaaaagtagtattttcaagcggcatttgattgaggacttgctctgtgactacttcttggacaggtttaccaaaaatctttttaataactaatccaagtaagataaagtttgtatcggcataccgcatcttgtgttcaaattcgtcagttactggcagattgataattgcttgtagtaaggcatcatgatctagtttgtcgcggtgggggatccagccacgaatgccactagtatgggttagcaagtgataaaggcgtacacgcgggtctttaaattcaggaacgaattgctgcaagggctcggtaaagttaagtttgccttggtcataaagcttaagcaagacattttctgttgctaaaaccttagtcaaactagctaggtcgtattctgcaaaagggctcagctgagtaacttctgggtagatactagcaaaaccagtagttgatgtaaaaatttgcttatttttgataaaagtgtaattgacgcctggaacaacgcgttcaaaaaccattgattcaattaaatgctgtgttttattaaagtcgatcatgtttcaccatccattagcattattatagttaaaattacttgacaagcatagaagaaaaaagcataattataaatgttgattcgcccgttggtcaaatggttaagacgctaccctctcaaggtggagttatgagttcaattctcgtacgggtgatttactgggatatagccaaattggtaaggcacaggattctggttcctggatgtttgggttcgagccccaatatcccaataattagaaaggctgtagcattagagctacagccttttttgtacacaaaaaaggattcccgcgggaatcctttctatttacataccagccttaatgattttcttttcggccatcttctttctaagtgcaagcattgcagtataagttgaaagaatatagaccttcttagttggcagttttttaatttcttcaattaggctatcatcatctggattagtactcatttgtcctggatcaaagccagcaatttcaagtctaaagcccatatcatgccagcgttgaccaccgacgaggatctttttaatcttttctttgtctaatccttcaaaatcagcatcccaaatccaagaagtatcaattccatcagcgtggttggcattaagcaaggcaactagtgaataatcatctttttctgtattaagcatgtgcaagacttcatccaaaccaactgggtttttaactagaattaaatcgatatccttatcgccatagtgaattaattcttgacgaccaaagatccgtttattttctgcaaaagcttgagcaacttcagcttcagttaatcccaagtggcgtgcaacagaataggcggctaaggcattataaatgttataagtaccaccaatattaatggaatattgcttgttgcccatttggaacgttgagctattaggtgtttgatcaataatcttgttaactgtaaaagttaaatcaggacggtggtagccacagttaggacagaagaagtcacctaagttggcataaatacgttcatgataatgtaaaatgtggtcgcattttggacaaagaacaccatcggtattgactggagccttgaagtcgttttcaggtttgtcatcaggaagtttaaagccataaaaaattttcttattaggcaattcaactgatgaaaaaatgcttgcatctccgttagcgataattgtagcgtcaggtgctaatttaataccattaacgatcttgtcataagtggtatagatttcaccataacggtccatctgatcacggaaaatgttggttaatacaaagacgctaggatgaagtaatttggtcaccattttaacatttgcttcatcaacttctagaacagcgatttttcttttaactctcttgtgcttgtgagccaaaaaagcggtcacgattccttgttgcatgttggaaccagatggattagttaacacatcaccatactttttctttaaagcttcaacaatcaaagcagtagtcattgtcttaccattagttcccgtgacaataacagtttcatagcctttggctaaagaatttaaaacttctggatcaattttcattgctaatttgcctggaaaactggtgccgcccttaagggcattatgcaaaaaccaatagcttgatttaccggcaactttagcaattcctgatttaaaactcatgtacatccctcactttaaaactatgtctaagtttagcatagagcgaggatgaaaacgaggtttaatacctacacaaatttattttttcctctatactattaaggcgaagactttttgttaaaagggagggccagcatggcgcaattattttttcgttatggtgcaatgagcagtggcaaaacaattgagatcttgaaagtagctcacaattatgaagcacaggggcgcaagattgccctaatgaccagtggcttggataatcgtagcggtgtaggaacgattgcttctagaattggacttcaccgagaagcaattccaattactgctgatatgaatctatttgattatattaaaaagatgaacaaagcagatgttgctgatggtgatggtaaactagcttgtgtgttaattgatgaggcacaatttttgaagagacatcatgtcttagaatgcgctaaaattgtggatgtgttcaatattccagtaatgacctttggcttaaaaaacgattttcaaaatcatctatttgaaggtagtgaaaatttattgatttttgctgataaaatagaagagatgaagaccatttgtcattattgtggacacaaggcaacaatgaatttaagaattaacaatggcaagcctgtttatgagggtgaacaagtacaaattggtggcgatgaaagttattatcctgtttgtcgctatcattactttcacccaggtgttgaaagatagagaggatttttagtttatggataaagttatggctcaattagagggtctagtagctcactatgaagaacttcaggaaatgatggccgatcctgaagttattaatgatactaagcgctacatggagatttctaaggaagaagccgatttgcgtgaagtagtacaaaaatataagaagtacaaagaggacaaaaaagagattgaagataataaagaaattatctccagtgaaactgatcctgatttaattgaaatggctaaggaagaaaattctgaaattgagaaagaaattcccgagcttgaagatcaaatcaagattttgatgttgcctaaggatcctaacgatgataaagatattatcatggaaatccgtggtgctgccggtggtgacgaagcttctttgtttgctggcgatttgcttagaatgtatgaaaaatatgctgaacgtcaaaactggaaggtttcaatgattgattcagaacctactgaggttggcggctataaacgtgtggcaatcatgattactggtgacaaggtttattcgaaattaaagtatgaaaatggtgcacaccgtgttcaacggattccagtaactgaatctcaaggacgtgttcatacttcaactgccactgttgctgttatgcctgaatatgagcaagtagacattgatattgatcctaaggatattcgtgttgatgtttaccgttcaagtggtgccggtggtcagcacattaacaagacctctagtgccgttagaatgactcacttgccaaccgggattgtagttgcaatgcaggatcaacgtagtcaacaacagaaccgtgaaaaggcaatgcaaattttgaaatcacgtgtttatgactattatgaaagtcaaaatcaagctcagtacgatgctaagagaaagaatgcagttggtactggtgatcgttccgaaagaattagaacatataactatccacaaaatcgtgtaacagatcaccgcatcggcttaaccattaacaagcttgatcgtgtgatgaacggtgaacttgatgaaattattgatgcattaattctttacaaccaaactaagcaattagaggagttggctgatcaaaatgcctaaaatgactttaaagcagatgcgtattaaagcgggtgagagtgctgaaaatgcgcgtcctgaggatgttgattatgttctagcagagcgcttaggcttgacaccaagtgaatttgaactgaagcaagaaatggacttaactgctgaccagattaagcaggccaataaagatatcgaaaaattggctaagggcatatctccacagtatattttgggttatgcttggtttttgggctataaaattatggtgcaacgcggtgtcttgattcctcgttttgaaactgaagaattggttgaatgggcattgcagacacttaaatcaggtgatcaagtccttgacttgggtaccggttctggctgtattaccgtggctttagctaaagaagcacagaaaaaaggcattacagatttaactttatatgctagtgatgtaacggatactgccttaagaacaagtgaggaaaactttttaacttatgatcttgatgtaactactcgtaaagccaacgtgctgttgggcttagaagaatttgataagatcatctctaatccgccgtatattaagacaagcgaaaagaatgtaatggatgaaaatgtcttgcaaaatgaacctaaagaagctctttttgctggcaaagatggtctagacttctataaaaaatttgctaagcaagtgcgtgagcatttgaatagccatggagaatttttcttagaatttggttttagcgaagaagaacaactgaaggaattgtttgctaaagaattgcctgattttgaaatcgaatttagaaaagatatggccggcaagccacgcatggttcatggaaggtggcaaaaataagaatgatggaaacgaagatttttaaaaaagatcaaatcaatgatgcagttaagttgttagctaagggtgaattggttgcttttccaactgagacagtctatggtctaggtgcaattgcaaccaaagaaaagtctgtgaagggcgtttatgctgctaagggacgtccaagtgataacccattgatcgttactgtttctgacgaagaaatgatggctaagtatgctaaagaagttccagaaagagctaagaaattaattaaacatttctggccaggtcctttgacattgctattgtttgttaaaccaggaactctgccagatgcagttactgggggacttgatactgtagcatttcgttgtcctgatgatcaattgactcatgatttaattgctaaattgggttatccaattgtaggaccatcggctaatacctcaactaagcctagtcctactactgcagagcacgtttaccatgatttaaaagggaagattgccggaattattgatgatggccctactcgtgtgggattagaatcgacaattatcgacttatcggtagaaacaccaatcgttcttcgtcctggtgaaattactccagaagagttaagcgaagttttaggtgaaaaagttttaattaacacgggcaaagtgtcagacaaagatatacctaaggcaccaggaatgaaataccgtcattatgctccaagtgagccggtagtcgtggttgatgatcctgctgattttgcaaaaattgattttaatgaaaaaattggtgtagcagctttagcgccagtcttagctaaaattaatttacctcaagcaaataaatttgatctgggcaacaatttagttgatgccgaccataacttatttggtggcttgcgctatttcgatgatcaagatgatatcgaaactatttatgtacaaggatttcatgaaggtgaagaaagtttagcttacatgaatcgattgaataaagctgcaggtggacatcatttcaataaataaaaaataaaacgcaaagggctttaaaccctttgcgtttttgattaaaatatttaatgatcatattattttttataggaggcatatatgggaaagttcgtagttttggatcacccattgattcaacacaagttgactattattcgtcgcaaggatacggggtcaaatgaattccgtcgcattgttggtgaaattggtgggttaatgacctatgaaatcactagagatttgccacttgaagatgttgaaattgaaacaccaatgggtaagactgtccaaaaggaaattgctggtaagaagttgacaattgtgccaattttacgtgccggtatggggatgcttaatggtgtccttgaaatggttccttcagctaagattgccgttatcgggatgtaccgtgacgaaaagactttgaagccacatgaatatttcttcaaggctccaaaggatattgctgaacgtgaatgtttagtcgttgatccaatgcttgcaactggtggctcagctaatgatgccattgctgcattgaagaagcgtggtgttaaggaaattaagcttgctgttttggtagctgctccagaaggtattaaggcagttcaagaagcaaatcctgacgttgacatttatgcagctgctgaagatgacaaattgatggataatggttatattttcccaggtttgggtgatgctggtgacagactatttggtactaagtaatcgtcctttttagaaaaatattttctctaatgcgctttcattttacacaaagaccttttttggtgttaagatgatttacgtgttcgagttttattcagcacgagaagggaggtcacgaagtaatggagaaatcatttgtttttaaattcatgggcttgaattttgaactttctggtattatcggttcaacgctaatggctttagcagttttatttatctgcatttggctttcaagaaaagttgaaatgaaacccaataagagacaaaatgtgttcgagtatttacttgatttcactaacggcattgttaaagataatgttagcgacaaggatgctcaaaatcacctatcactatatgcatttgttttattcctgtttatttggtttatgaaccaattagggatgttcatggaagtcaaagttgatgattggatgtttattaaatcaccaactgctgatccagtagcgacaatgtcgtttgcaatgatgaccttgcttctatcgttcacattcggcgtacaacgatttggtgttggcggatatttgaagagctatacgcaaccagttggttttatgcttccaattaatttaattgaagagtttaccaactttttaaccttatcattacgtctatatgggaatatttatgctggtgaagttttgctaactttaattggtaatgatctagcacatgctggtggaccatttacgttagttttggcagctccattagccatgatttggcaaggtttctctgtcttcattggctctatccaggcatatgtttttgtaactttatcaatggtttacattggtaagaaggttactacagaataaatttttggaggtataaatttatgtcagaagcttttaaatatcttgctgcatccattgcagctggtttagcagctttggctgcatcattgggtaacggtaaagttatttcaaagactcttgaaggtatggctcgtcaacctgaaagtgcaggtaacttgagagcaacaatgtttattggtgttggtttgatcgaagccgttcctattttggctatcgttgttgccttcttgattttgttcctttaataaaaagagataattttctgtttaaaggaatagtattaaagagagaagggcagtaaatgactattcaaacattatttgcagcctcacatatttacttaggtaatgctatctggtatttgatctgttttgccatcttgatgcttcttattaagcactttgcttggggaccagtatcagatatgatggaaaagcggcggcaaaaagttattgatgacttggattcagctgctagtgaacgaaagaaagctgaaacgcttgctaatgagcgtgaagctgccttgaagaactcaagacaagaagcaacacaaattctctctgacgctaagagtaacgcgcaaaacacaagtaaagaaatcgtagcaaatgcaaacgaagatgctgcagcaattcgcaaaaaggctaatgaagatgccgatcaggcaaaagcagacgctttgaattctgcacgcgatcaagttgctgatatttctgtagcaatcgctgaaaaagtaattgctaagaatttatctgctaaagaccaaaaagatttagtcgaccaatttattaaggggttggatgattaatggctttaagtagagaagaaattgcagcacgctacggtgccgcactatttggttatgcgcaagacaatgatgcattagacactgtttataatgaaatggtggaattaaaaaaggctgctgaagccaatccacaaatcattagtgtcttgagcgatcctattttaagtaataaagataaaaaggatcttttgactgcaattgaaaaagattttttagatgaggttcaaaactttttgaatttgttacttaaatatgatcgttttgctgatttgatcgatattattgatcgctttgtcttactttatgataatgaaaagaaggtcgcatctggcgttgcaactacggctgttaagctagatgatgatcaactcaaacgtttaggtgaaagttttgctaagaaatataacctaaacgtggtgcgtctagagaataaagttgatccaagtattttaggcggcgtggttcttcaagtagaagatcgcgtgattgatggatcagttaagaataaactgaagaagatccgtgcgcagataattgataaaaattaaaagaggtgaaaccattgagcattaaagcggaagaaattagttccttgatcaagcaacaacttgaacattacgacgataagcttgacatcagcgaagttggtgttgtaacttatgttggtgatggtatcgcccgtgctcacggacttaacgatgttttgtctggtgagttattgaagtttgataacggctcatacggtattgcacaaaaccttgaatcaaatgatgtaggtatcattattttgggtcaatttgacaatattcgtgaaggtgaccgtgttcaaagaactggacgaatcatggaagttcctgttggtgacgccttaatcggtagagtagttaacccattgggtcaaccagtggacggtttgggtgaaattaagactgacaagagtcgtccaattgaagccaaggctccgggggttatggatcgacaatcagttgatcaaccacttcaaactggtattaaggctatcgatgccttagttccaatcggtcgtggtcagcgtgaattgattatcggtgaccgtaagactggtaaaactagtttggccatcgacactatccttaaccaaaaggggcaagacgtaatttgtatttacgttgctgttggtcaaaaggaatcaaccgttagaactcaagtagaaactttaaagcgttttggcgcaatggattataccattgttgttgaagcgggcccaagtgagccagcaccaatgctttatattgcaccatatgctggtactgctatgggtgaggaatttatgtacaatggcagggatgtattaatcgtatttgacgacctatccaaacaagccgtcgcttaccgtgaactttccttgcttctccgtcgtccgcctggtcgtgaagcttatccaggtgatgtcttctacttacactcacgtttgcttgaacgtagtgctaagttgaatgacaaacttggcggcggttcattaacagctttgccaattattcaaactgaagctggggatatttctgcatatattccaaccaacgtaatttcaattactgatggacagattttcttgcaaagcgatttgttctttgctggtactcgtccagccattgatgctggtaactcagtttctcgtgttggtggtaacgcccagatcaaggcaatgaagaaggttgctggtactttgcgtactgaccttgcagcttaccgtgaacttgaaagtttcgctcaatttggtagtgatcttgatcaagctactcaagctaagttgaatagaggtcaaagaaccgttgaagtattgaaacaaccacttcatgatccaattcctgttgaaaagcaagttgtgattctttatgctttgactcacggatatcttgacgctgttccagttgaagatattgctcgtttccaaaacgaattatttgataactttgacagcagtcatgctgatttgctcaagacaattcgtgaaactggtcaattgccagatgataagaaattgtcagcagcaattgaagaattcagtgagagctttacaccaagtgagaaataggaggtagaatatgcctgcatctttacttgagttaaagaaaaaaattgcttcagtaaaacaaactggtaagattacagaagctatgagaatggtctctgcttcaaagttgaaccaaactgaaaatcgtgataaaggttataccgtttataacgaccatattcgtagaactatttctcgtttaattagctcagaagtagttgataatctacgtgaaaaagacgtctcaattgataagaacaatgttgctcaaattgattatactgatgtctttggtttggggattacagcagatatgattcagccacgtaagaatatcaagacaacaggtttcttggtaatttcaggtgaccgtggtcttgtaggttcttataacagcaatgtcattaagaatatgatgagtatctttgaggacgaacgtgctcaaggacacgatatcaaagttcttgctgtaggttcggttgcggcacaattctttaaaaagaacaatattaacgttgtttatgaaaagaatggtgtttcagatgtaccaacttttgatgaagcattaccaattgtttcaaccgcaattaagatgtttttgaatggtgtctatgaccagctttacgtatgttatactcaccacgttaactcattatcatctgcttttcgtgttgaaaaaatgttaccaatcgtcgatttagatattggtgtcaaagaagctgaagcacataaagaattagaatacgatattgaaccagatccaaatcaagtgttaatgaagttgttaccacaatatgcacgttctactatttacggtgctattttggatgctaagactgccgaacatgctagttcaatgacagccatgcagagtgcgactgataatgctaatgatctggtatcaaacttaactacaaaattaaatcgtgctagacaggcacaaattactactgaaattactgaaattatcagtggtgcaaatgccttagagtaataaagaaaaggaggtagatgttttgagtgaaggtgaaatcgttcaagtaatcggcccagttgtcgatgttaaattcccaattgataagaatttacctgatattaacaatgccttgcgtgtaattaagtcagaggatgaaagcattgtccttgaagttacacttgagcttggtgatggtgtcttaagaacgatcgccatggaatctaccgatggtcttcgtcgtggtatgaaagtcgaagatactggcggtccaatttccgttccagttggtgaagatactttaggacgcgtgtttaacgttttgggtcaaccaattgacggtggtccagaattttcaaaagatcaccctcgtgaaggtatccacaaggaagcacctaagtacgcagacttgactactagtcgtgaaattcttgaaactggtatcaaggttatcgacttgcttgagccatatgtacgtggtggtaaagttggtttgttcggtggtgccggtgttggtaagactactatcattcaggaattaattcacaacattgctcaagaacatggtggtatttccgtatttactggtgttggtgaaagaactcgtgaaggtaacgacctttacttcgaaatgaaagcttcaggcgttttaagtaaaacggccatggtatttggtcagatgaacgagccgcctggtgccagaatgcgtgttgcgttaactggtttgacacttgctgaatactttagagatgttgagggtcaagacgtgttgctctttatcgacaatatcttccggtttactcaggctggttcagaagtttcagctttgcttggtcgtatgccaagtgccgttggttatcagccaactttagcaacagaaatgggacaattgcaggaaagaattacttctactaagaagggttcaattacttcaattcaagccgtttatgttcctgccgatgactatactgacccagctccatcaaccacattcgcacacttggatgctactactaacttggaacgtagcttagtagaacaaggtatttatccagctgttgacccacttgaatcttcatcaagtgcccttgaccctgaagttgttggtgaagaacactatgaagtagctactcgagtacaacatgttttacaacgttaccatgaattacaggatattatttctgttttaggtatggatgaattgtctgatgaagaaaaattgatcgttgcacgtgcacgtaaggtccaattcttcttgtcacaaaacttctttgttgcagaacaatttactggtgtaccaggttcatatgttccaattaaggaaagcattaagggctttaagcttattttggatggtcatcttgatgacttaccagaagatgcctttcgtggtgtcggcccaattgaagatgttttgaaaaaagcacaagaaatgggtgtaactccaagtgatccagaagctaaagctttactagaaaagtagggtgatgtcaaatggcagatccagagaagctttttaaagtagatgttgtaactcctaatggaatgatttattcacatcgtggaagtatcgttgatgtacgtgccgttgatggtgaacgttcaatcatgtataaccacgtaccacttttaactccactagttattagtgaggttaagattaagcgaagccgtgaaatggattcagtagttgatcatattgcgatttcgggtggctatattgagttttcgaataatgttgctacgattattgcagatagtgctgaacgcgcaagaaacattgatgtttctcgtgctgaggcagcgaagcaacgcgctgagcaacgtttgaaggaagcacgggaaaaacatgacgaacaaactatggcacgtgctgaagttgctttaagacgagcaatgaacagaattagcgtgtacaacactaaaggtcactagaagaaggaagagacgaatgcacaaaatgctgcatccgtctttttttgtcaaaattgaggaaaatatatgtttcaattaggcgttcatgtcattattagtatcattatatatttgattgcgattggcttatcttttcaagcagttaaagcaattcaactagataaaattattcgtaaaggccatgtttttgaaacgcaattattatatttatttattgcaattggcttaggctttttagttggcaattttgtcattacttttatcgatacttcaatgcaattgagtaatttgttttaaagattgtgttaaaacaaggacagtaaaggaaagtcatgattatttatggtaaaatggacggtgaataattatggagggttatcgtggcacgagatataggaattgatttggggacagcaaacgtactgatcaatgtctctggtaaaggtatcgtattaaatgaaccttctgttgtagctgtaaataccgatacaaacaaggtagttgcagttggttcagaggcatatgagatggtaggaagaactccaggtaatattcgagtaattcgccccttgaagaatggggtaattgctgattttgacattaccgaagcaatgctgtcttactttattgaaaaattaaatgtaaaaggctttatgtccaagccaaatattttgatttgtgctcctactggagttacttcaattgaacaaaaagcaattattcaggcagctgaaaagtctggtggcggcaaggtttatttagactttgaacctaaagttgcggctgttggtgcaggcttggatatttttaaaccgcaaggtaatatggtgattgatatcggtgggggtaccactgacgttgcagttttatcaatgggtgaaattgtaacttctcaatcattacgttatgctggcgatcggatgaaccaggctgtcatcagttacattaagagtaagcataatttgttaatcggttctagaactgctgaacaaattaagattgaaattggtagcgcctttgaaccagaccaagatgaacaaattactgttcgtggtcgtgacgtagttgatggtttgcctaagcagactacagttactgcaccagagattcaaaaggctttagaaccaggcttgatgtcaatcattgcagcagctaaagaagtattggaaacaactccaccagagctttcagcagatattattgatcgcggaatcatgctaacaggtggtggagccctattaaagaatattgataagttgatttcttattatttgcaagttccagttttaattgctgatcatccattagaagcagttgctttaggaacaggtactttgcttaaaaatattgaaaagcatcaacgacactaagtgaggagattacttgcgtaagattttgatttttattgtacgtatttatcagacagtgatttcacctttactaccaccaagttgtcggtattatccaacatgctccaattacatgattgatgcattgaaaaaacatggtcctattttggggctgattatgggaatttgtcgtatactaaggtgtaacccatttatcaagggtggagtggatccagttcctgataattttactatttttcgaaatccacatccggagagatatgaagatccaattattgcttcaaaatttcatccggatagcaagtaggaggatttatgtctaaaaaattagagaatattgatattgaagttaatgaacttaagggaaagaatttgccaacgtgggaagttgttattcctaatagaaagtccattggtttaattgaaaaggtagaggggcgttatcgtgctactacttctaagacaagcaatattttgtttgctaacagtcttgaaagcagcattaatgacttactttcatactttaccttacatgaaaaataaaatataagtagtgattatttaatggcaaaagttgaaaatgaaacaagtctattcgatcgattagcctggaatattattataccagtgctactcttggctttaattagcttgtattgtatctatgttgctgcattaggtgatcctagtcatattggttcacctgttagggcagtagttatgcaggcattatggtacttgatttcaattgcaattattatggttgtgatgcagtttgatgcagaacagttgtttaagattgcgccaattttctttggaatcggaatatttttgctgattgcggtgctattcttatataacagaagcgtagctgcagatacaggtgcgaaaagttggttcaaactagggccgattacttttcagccttcagaaattatgaagccagcttttatcttgatgttggctcgagtggtcaaagagcataatgataaatatggtcacacgattaagaccgattggttgttattaggcaaaattattgcttggctggcaccggtagcaattttactaaagttacagaatgactttggtactatgttagtatttattgccatcgttggtggcgtggttttagtatcagggatttcttggaaaattattgtaccgttatatggtattttgattttagcagctattggggttattgtattagtaactacgtcggctgggcaatcattgttgagtcatttctttcaagcatatcaatttgaacgaattaagtcttggctcgatccatctggtgatacttcatcaggagcttatcagttatggcaaagtatgaaagccattggttctggtcaactatttggtaatggttttggcaaagctagcgtttatgttccagttcgtggatcagacatggttttctcggtaattggtgaaaactttggttttgtcggctgtgtagcattgattttgatttatttatacctgattattcaaatggtaaaaatctcgttcgataccagaaatgtcttttattcatacattgcaactggtgttatcatgatgatcttgttccacgtatttgaaaatattgggatgaatattgatttattgccattgacaggtattccattgccatttgtttctcagggtggttcagctctgatgggaaacatgattgggattggattaatcttgtcgatgaagttccataatcgtgattacatgttcagtacggctggcgatttttagaaataacattaaaaaaatcctccaaaaattcaaatctgaattttggaggtatttttttatcggttattaaagctaaataattagccttgcaaagcatccttaacttcttcagtacgacataccaagacgtcacatttagaagttctggttacgtattcggtaacactaccgatgagcagacgttcaacagcgttcaaaccagtagcacccacaacgattaaatcaatattgtgcttcttagggaagtcatgtccaatgattgtcttaggtgaaccaaattcaatagagtagtgaacatcttcagcgccagccttagtggcacgagcttggtaatccttcattctcttttcagcatctttagaaacttgttctaccattgctgaatcaaaacttgaaacattttggaaagaacgagtatcaattacgtgtaagatttctagtgttgcatggttacgcttggcgatggctacagccttgctgaaggccaagtcagcttcttttgaaccatcaactgcaacttgaatattcttgtattgtgaaagcatatataagcacctctttctatattctattttaccaaaattttgcttgtcattagtgaattattattctttattttgagtaattgataaaccaaaagccaaaatagttaatgaagctaagaataaggtgattagatttaaatatttattacccatgaatagcaaaataatccctaaaatactttcagctaaaagggcgactgaagtccacttaagaatattgctcaagcgtggatcgccaccaatgtcataaattaaaaaatgtccgttccttctgtgccacatgtaccacgaggttaacagtaggagaaggataaaaataatcattacaatctttattgccatttaacagtctccactatagaaaaagacggtcaattgagaccgccttttttaatattctaaagaaatccgagttgactaaacatagcataatgacgcttgttgaacccgcaatgttcaaaattttagctggcatcgcagcgaatatggatcctgcaacaaggcagtattccgattcggtagttatttgccaactcccacgtcttatagtttgatcggtcaactttatacatttaagcttgtcgatcaactcagatcacttattataatacgcatattacaggtgcttgtcaaccatattgaatgcgcgagattagtgattattgcgcaagttatcagactgcatttgttttaatttttgataggttgccttatatctagcttcgattttagaattgcctttaggtgcaaagtagctggcatgaagcaggttattaggcaagtattgttgtgctacccaatcattttgataatcatgaggataaaggtagttcacgccatgtccaagctttttggcaccagagtaatgagcatcttttaggttggcgggaattgagtcaacttttttggttcgaatatcagctagtgcagcatcaattgctgaaatggcactattgcttttggcagaaagagctaactcaataaccgcattagccagtggaattcgtgcttcaggcaagccaaccatttgtgcagcttggatggctactatagcgtgttcagctgcgtctggatcggctagtccaatatcttcgtaggcaattactgctagtcttcgacagatagagactaagtcaccagattcaattaatcgggcaagatagtgcagcgctgcatctgtatcagagccacgaattgatttttgaaatgctgagactagatcgtaatgtccatcaccagaagcatcaaagttttgcaccttcatttgaattgaatcagccatttctttttgagtgatgataattttttgatcatcttggtgtttatcttgcaattcttgcttagttgaaagaacagctaattctaaactattcaaagtagaccgcaaatcaccgttgcctttttcaatcaaaagagcacgcgcatcatctgttaattcaacattatatttgcctagacctttttctttatcgttcaatgcgcgattgattgcatgagaagcatcatctgtagaaagaggctttaattcaaaaatttggcaacgtgaacgaatagcaggggagatcgaaatataagggttctcagtagttgccccaattaaaatgatttgtcccgattctagcaaaggcagtaagaagtcctgcttagttttgtccaaacgatgaatttcgtccagcaataagacaactgtcccactcattttgccttcttcggctacttgttgcaattgctttttgccgtcagtagctgcattgagctttctaaaggcatatttagttgagcctgcaatagcactagcaatacttgtcttaccgatgccaggagggccgtaaaggatcattgaagacagaagtctagcttccaccattcggcgaataattttgcctggaccaatcagatgcctttgaccaacaacttcgtctaaattagttggtcgcatacgatatgctaatggtttcatttacttatctccgtgaaaaagtttatgccaaaaactttcttttgttttaggtgcggctaattcttctttaggaaactcaggtggataaacttgctttagctcaattcgtggtcgattgatagcgtttttcgctacaactagtactgccgtatcatgtggtcctgtttttgcggtttcattgttaactaaagtgaagggaatatcatatttgctgcaactggcttcaatgtctcccaagaagccatcatcagtgatattgccattgatcaaaatagtatagcccttaaagtcagtgatatgtttaagaaatagggcagttaattcaggatttttaacttcagtattgtccatacggattaagcagcgctcacgtaatgaacctaaaaatctgcggcgttcatcaggcttagtttgtggagtaataccttgagctgcttgttcaacacgtttatttaaatcttcagtcatctaatcatcctttctttttatgtacttattgtagcaaagaaaaaagcctttctcgattgagaaagactttcgacaaaataaaatgtaaaaattaaagtaacttgttgtaccattcaacaactaaggcttcatcaatttctggttccatttcgtcacgttctggtaaacgtacaagagtaccttccattttgttttcatcaaatgaaacaaatgatggacgagcagtaactgcttctaaggcatccttaacttgttgtaagttctttgacttttccttcaagccaatagtttggccaaccttgacttcgtatgaaggaatgtcaacacgcttgccatcaacagtaatgtgaccgtggtttaccaattgtctagcttgttctctagtagtagctaaaccaagacggtaaacaagactgtccaaacgacgttcaagtaaaatcatgaagttaacgccgtgttgaccttcacgaatcttaccagcgcgggtgaacaaagttctaaattgacgttcgtttaagccgtacatccaacgtaacttttgcttttcgtgcaattgttgaccgtattctgacaaacgaccgcggttgttaggaccgtgttgacctggagcgtagttacgacgagaaatttccttaccagtacctgaaagggaaatacccaatcttcttgaacgtttccaacttggacctgtatatcttgacataaaaaatcctccataaaatttaaacaataatttttggagtaaaatattaagcataagttcaacattcgtgcatcttggatttacattttcgcccaatgcagcgcgggttactcgttcactaaagcgtttcaagatgttgacgttcttgtcacttattgctgcaaatattttacacgaatagtattatatagagttcagaataataaatcaagaaaatagaacagctttttgcacctattagggtcaggttttgttataattatgatagttttggaggataaactatgtcatcaattcaagctattataattattgccgtggtgatcctaatcattgtcgtagttgcagcaatgctaatgatcaatcgtaaacaactaaaagaaattgaagcgattgatgcagcagtgactgaaattgagaagatgcatctagaagatgatattacgcgactggataaaatggatttggccggcgaaagtttaactacattaaatacttggcgcaagagctacactgaagcagctaagaaaaaattaccgcgagtgcataagctagttgaagaagctgctaatgaaaatgcaacttatcgcttgtttaaagcaagaaagaatattaaacaagcacaggagattatcaagccaacgctcgaagatgctcgtaacaccaaggcagttttcacggaactacttgaatcaaataaggaaaatcaaattcaatatgatgctttgattaaagtttatcgtgaattaagaaaagatatcttagccaattcctttgaatatggtgctgcgattgatcaggttgaagatcaactagcatcaatggagagtgactttgaagaagcaaaaaatctttcttcacaaggtgatcatgttgaagctaagcgagttttgtccaagattcggatgtctttgggtaacttacaaaaacgcttaaaaccgctaaaagagggttatcatcagcttgaagtagtgttccaagatcagcttaaggaattgtctgatgcttataaaaaaatgatttcagaaaaatattaccttactagcgtagatgttttgggcagaatcaaggaaattcatgatgaaattgatggtgcgcgcaaattgctagctgagactaaggtggatgaattagccaaggaaaataaaaagatctctggcgaaattgacgacctgtatgatgttttagctaaggaatacaaggcaagaccatttgttgaaaaaaatcaaagtaaaatgctgactttgatctcacatcagcaaaccgcgtcaaagaaactggtagaaaagttgcggcatattgatgagagctatgaattgactcatggcgaattggaaaagagtaaagacttagaaaaagaagtcaatgaaatgtaccatcagtacactattgatacacagaatatcgcagatggtaagggtgtttactctgctattcaagattcatggctccagatgctagatcgcctgcgtgaaattgatgcagagcaggctaagatgtcaactgacgttgatggactttatgattctgaaaatgtagctaatgattcaatcaagcgctttaagcaagaagtttcattagtttatcgtcgacttgaaagacgaaatttgcctggcaatcctgatagctttgtccaaatgtacactttggtagtcaacgagattggtcatgtcagcaacgaattaagtcaggtccggattaatatggaaaagatctcagctgaattaattcaaatttctgatgatgtggagcggcttaaacgtgaagcagatgacatcattaattccgctaacctagttgaattgacgatgcagtattcaaataaatatgcagataaggattcaattgcgcaagcacaaaagacagcaatgcagctatataatgaatataactataaggaagcccttgatacaattgctacagcaattgaaaaggtagagccaggtagttatcaacgacttgaaaatgcatattattcagaagagaagagtaattaattgaagcgattcattatttaagctaaaattgaaaagtcttgaaacggtcaagcgattgaccgttttttaaatgaaggggtaatgatagtgatttattttgataatagtgcaacaacgaagatagatccacaagtattggatacttacaataaagtagcgactaatatttggggcaatccttcgagtttgcataagatgggtgatcgtgcacaccaattgcttgaggcgtcacgtaaacaaattgctgatttgctggggactaagcagcatgaaattttcttcacttctggtggaacagaatcaaataatgccgcaattaaggggactgcaattcaaaagcgtgaatttggtaagcatattatcacttctagcgtggaacatgcatctgtagccaatagttttaacgcgttagagaatttggattggcgcgttaccagattgccagttgataaggaaggccgagttaacgttaatgacttaagaaacgcgattgattctgatacaactttggtttcaatcatgggcgttaataacgaaattggcaccattcaaccaattgatgagattagcgatttgcttgaaaattatccaacgattcagttccatgttgataacgttcaggcacttggcaaaaatatttgggataaggtttttacaccaagagtagacctctcgagcttatctgcgcataagttccatgcaccacgtggtataggtattttatataaaaaagaaggcaagatgctgaccccattacacgatggtggtggtcaagaaaagggcttgcgttcaggtactgagaacttgcctgcaattgcgggaatggctaaggcaattcgtttgcttttagaagatgaaccagaaaaggccaagcgtgaagcagaaattaaggctaaaattgttgattatctaaaagataaaccagggattaatattttttcaccagtaagcgatggctttgcaccacatattctttgctttgctttagagggaattcggggcgaaactttggttcatacgctagaagatcaagatatttatacttcaactacttctgcttgtgcatcaaagacggcagatgaggctagcaccttggtttctatgcgaattgatgataagattgctactagtgcaattcgtttaagttttgatgagacgaatacgcttcaagaagcggatgaatttattaaggtctttgacaagatctataatcattttgctaaaattaatcatttgggagaaaattaatggaatacacagaagttatggttcgctatggcgagctttcaactaaggggaagaacagaaaggacttcatcaatcgcttagcaagtaacgttgaaaaagttcttaaggatttcccacaaattgaatttcatcctcgtcatgatcggatgcacattgtcctgaatggcgcatcattcaaggatgttgaccaacgtctgaagaaggtatttggaattcaaacttactcaccagcaattaagattcctaagactcttgaagatattgaaaagacttctttggaattgatgcaagagacttttaagccaggaatgacttttaaggttaataccaagcgtagtgaccacaagtttgaatacgacactaatcaattgaataatctagttggtgactacttgtttgatcatatggatggcttgaaggctgaaatgaagcatcctgatttggtcttgagaatcgaagttcgtcaagatgccgtttatatttctaatcagttgctccatggtgttggcgggatgcccgttggtactgctggtaaggctgtgatgatgcttagtggtgggattgattccccagttgcttcatggctggcattgaagcgcggagtagatattgaaatggttcacttctttagtccaccttacactactgaaaaggcattggctaaggctaaggaattgactggtattttggcaaactacgctggtaagattaattttattgccgtaccgtttgctgaaattcaagaaacgatcaaggaaaaactgccagaaggctatttgatgactgtgcaacgtcgttttatgttgcagcttgctgaccgcattcgtgcacaacgtggcggcttggctatctttaatggtgagtcagttggtcaagttgcttctcaaactttgcaatcaatggtggctatcaatgatgtaactactactccggttattcgcccagttgcaacaatggataaaacggagattattgccaaagctgaagagattggtacctttgatttatcaattcaaccttttgaagattgttgtacaatttttgctccaccgcgtcctaagactaagccaaagttggaaaaagcgcgtgaatatgaagctcgtcttgacgttgaaggcctgattgaaagggcaatggctggtattgagattacgccaatttatccaaatgaaaaattcttggatgataaagctcaagaagacgctgacttgttatagaggattaatttcactggtgtttttgaaatttaatatgatacagtttaattatttagaaagatatggtgttaatatggaaacttctagtagtattatgtattgatttaaagttaatataataggcacgcgcaaaacgcgcgtaaaaacggtcgatttcgttttcgaccgtttttttgcgcgtgaaagagtataattataactaaatagtttagaaacggtgacctaaatgagagaaaccaaaaatttagaatttaaagagaaattgacgaatacttttctaaaaacggttagtgcatttgcaaattatggcagtggcaaaattaaatttggaataaaggatgatggatcaatcgttggtgtgaaaaatccagttgaattttgtttaaatgttgaaaataaaatcaacgattcgatcaaaccaaatccagattataatttagaaattgatcctaaaactaatgtggttactttaacagtaaagcaaggagttaatcctccatatttatacaaatcaaaggcctataagagtaatgacagtgcttcgatcgaagtggaccgatctgaattatcacagttaatcttaattggtgaaaatagaacctatgatagtttaaccgcgatgaaccaaaatttgtcatttaacattttagaagaagcattaaaagaaaagataggaattaaaagtttaacatctgatatattgattacgcttaatttagagcgtaaggatactagttacactaatgccggtgagcttttggcagacaaaaataattatcgtggaattgatattgttcggtttggtgaaagcattaatattatgcttgatcgagcaagttatgagcatgaatctattcttaaagagtataagcaagcaattcaaaaatatcgtcaatattatcaacatgaagaaatacagggagcaacgcgaaatattgtaagtcagattccagaagaagcttttcgtgaggcaatagccaatgccttagttcatcgagtttggaacattaattcgcaaattaaaatttctatgtatgatgacagaattgaagtagtatctccaggtggattgccacaaggacttagcaaagaagaatatctttcaggtcagatttccattttgcgtaatccaattattgctaatgttttctttaggttaggattaattgagcaatttggtacaggtgtaagaagaataaatgattcttatagaagtagtttggttcaaccgcagtttgaaatttttgataattcgataaagataatattgccagttttaaaatttattacggacgatctgtctaatgatgaaaagaaagtatatcaaataattcatgaaggtgcggatactacgaagcaaattagccaaatgagtaagtttggtaggacgaaagttttgaagattttgcggcaactagaaaaacaaggttatattagaagaatgggtgaaggcagagctacaaaatatattttaagcaaataatcgcgcgcaaaacgcgcgtaaaaacggtcgaaaacaaaatcgaccgtttttgattagtgtcgcaattcgaaattgggttaactttcttatataattaatattaatcaacacataagaacgaaagaaagacataatgcgcatagataaatatttggccaatatgaatgttggctcacgaaaagaagtacaccaattaattaaaaaaggaattgttgcggttaatgatgtgattgttaaaacgccaaagcagcaagttaaagaaagcgatcaggttaccgttaacggagatgctgttgcttatcaaaaatatcattatttcttattgaataaacctaaaggtgttttgtcagcgacggaagatcgcaatcagccaacggtgatttccttgcttgcaccgcaggaccgttatcaaggaatcgtgccagttggccgtttggacaaggatactactggcttgctccttttgacgaatgatggtcagttgaatcatgaattgcttgcacctggtaagcatgttgataaagtttatcgtgctgaaattgctggtgtagctaatgatgcaactgttaaaacttttgcttcaggaatgacactaggcgatgggaccaaactgcagccagcagaattgaagatattatcccaggatgaagagcacgataggtctacaactgaaattaaaatttgtgaaggtaaatatcaccagatcaagcgtatgtttggtgcggtagggatgaaagtcgttgagctagagcgaatttcgatgggaaagttaagcttgcctgctaacttaaagcggggagaatatctggaattgaagttggaagatatagttgggtaaaactttaaaaaacttcaatttctcacaaaaaaattgcacttttttgcgtaataaatagtggaagataattctgtcctactatttatgaaagaggtgcgcaatggaaaatacgcacaagaaaaagaagccctggtttggcttcacagaggatgtaatctttggtgagattatgtctaacaagaatttttgcaagcatgtcctacagggactggtgccggagattgagattagagatattcattatctgcagaagcagagaaaggtcgctgatcccaaacaccctaagcaaaaagctgttattctcgatattttggttgaggatgttgatggaaatctgtatgattttgaaatgcagcacatatcaaaatttaaagtgttgctatgttatctttctctgcatgtttgatccacaaggcaggcataagattaagagttcctatcatttgtatgaggatactaacaagacagatagattgaatgacaaaaattataattaatgcaaaaggtgttcctattaaagttttaactttaataatgaaaacgtagagcttaaaaacaatgatataattaagaccatattagttaaatatgttgaaatccaggacctcttgtctggattttttattaggaataattatggaaaaaatcaaaacagcaatctattcagaagattttgttcaattagtaaagtatgttctaattggcgtattagggctagtcgttgattttggaatttatacaattttgacgcatttcaagatgaatgttgaaatagctaacattatttcgtctacctgcgggatcatcaataactttttatggaattcttatactaactttaaagttcatgatcgcatgatattaagatttatttcttattttatcgttggtcagattaccacggtatttactacggtttccctatttattttcgttactaaattgggttatccgcacttaatcgttaaaatagtagcaacttttgtagcaactttaattcaatttgtaattaataaagtagttacttttagaaaagctaagaaagaagaaatctaatggaaaaattatcaattgtggttccttgttttaatgaacaagaaacaattccacttttttatccagcagtgcaaaaagtattagctaaaatgcccaaagtgacgcccgaatattggtttgtagatgatggctccaatgataacacactgaccgaattgaaaaaattgcatgagcaggacaaacatgttcactatatttctttttctcgtaactttggtaaggaatccgctatctatgcgggcctatcagctgcaacgggagattatattgtcttaatggatgtagatttgcaagatccgccttcacttttaccaaaaatgtataaaattttgcagactggtgactatgatgcagttggctgcagacgagtagatcgtaaaggggaaggtaagtttaagtctttcttgagcaatcaattttataaggtgattaatcgcatttctaaagtggaaattgtttcaggcgtacgcgactatcgcatgatgaccaggcagatggttaacgcagttttatcaatgaaagaatacagccgcttttctaaaggtatttttgcttgggttggttttaagactaagtatcttgagtaccacaatgtcgagcgcgtagctggtgaaactgattggacgactcacaaattattcaaatatgcgttgggcgggattgctgatttttctcaagcaccgcttaacttagctgtttggattgggataacttcattcattttgtcaattattggtcttatttttgtaattgttcgtaaactaatagttcctggttcaagtattttgggctgggccagcacaatttcaattattttattgattggcggtttgcagcttttgtgtatcggaattattggccgttatattggtaaaatctatttacaagttaaagaacgaccaatttatattgtgaaggaagagaaatgagaaagagccgtaaattggtgaatgtctgggatataattctcaggcattttctttttttattttaatttctcacaaaaaaatcgtgcttttttgcgtaataaatagtggaggataattttgtcctactatttatgaaagaggtgcgcgatgaaaaatacgcatacatcacgattcatgaaaagcaataccaaagtcattttgtatcatggaagcaatcaggctgtttatcagcctcgtataaataaaaatgtttttacaactgattttggtaatggcttttatgtgactgctaatcgtagacaagcagaaaaatgggcaaagcgtaaggctagatattcaggtcaaccgacattaaatagatatgtattcgatgctgatcaacccgacttgaaaatattagtttaccaagcagatattgattggattaagtttgtcattcaaaatagaatgaataatataaaagataattctgatatcgtcattggcccaacagcagatggtaaacttttttctgttgttaattgctggaaacatggtaatctagatttagatgaggctctgctaaaattaaaaccgagtgtttattcggagcagtattgtttcaagacagaaagagctctcaaagctttaacgttcatagataaggagttggttagatgattcccgaaattagtgaaaagcaatttcatcagcaactagctgaagcaattagcgacttaattgctaagagattaaacatttatcctaagcaggctctaaatttatttgagaagtcacgtgtttataaggatttaatgaattcagatgatgaatttgatcaaatgatgccagctgatttttttgatttgtggaaaaatgagcgtttagtcggtgtaccagttagttcggctgatattgctaacggattattgaaagataagaagtacaaatgattatcttattgctcggaatggagtgattatatcatggactacgaagagaaaatactggagcgagaacaagacgcacgtgaggaaggtaaagaagagggacttaaacgaggcgtcaaaattttagtttcttcacttaaaagaactggtaataccaagcaagagatcatgcatctccttgaacaaaattacggttctgattttaccgatgaacaattagaaaacttcctaaaagaaagttaaaatagcttgccaactacctacttgatatggtttaattatgtacaagtaaatagggagtaatcggcataaattgtatttacggcgtcagaacgaaatttattttccgctgtaagtttaaatgatgagactattgactaaacagtgttttagccagtagtctctatttttttgcttaaattactcttatgtttagggagggctttacatggaatactatcgtcagaaaaaagacgagatagctaaagagttaaataccgatttaaagcaggggctgagcgctaaagaggctcaagagaaattagctcaagttggtccaaatgctttagttgaaggaaagaagaaaattacttttcaggtctttttagaacaatttaaagacttaatggtgatcatcctaattatcgcggcaataatttctgcttttacgggcagtctggaaagtacgttggtaattattgttgtattgattctgaatgcgattttgggtacggtacaacatgttaaggcggaaaagtcgctagaatcgctaaagtcattatctgcgccaacggctaaagttttgcgtaatggccaaaaaatggagattgaggccaaggacttggtacctggcgacattcttttgttagaagcaggtgacttagttactgcagatggtcgaattttagaaaattattctctgcaagtcaacgaaagttcattaactggtgaatcgactaatgttgacaagttggacactgattttgaaaaagaagtgccgctagctgatcgggttaacatggtttactccagttccttagtaacttatgggcgtgctacggttgtggtaacggcaacggggatgcagactgaaattggtaagattgcttccttgatgaatgaaactaaggaacgtcgcactccgctgcaagtatcacttgaccagttttcatcacgattggctactgctattttaatcttgtgtgctgtgatctttggtattcaaatgtggcgtggtcaaccgctgcttgattcactgctatttgcagtagctttagctgttgctgcaattcctgaagctttgagttctatcgtaactattgtgcaagcaatgggtacgcaaaaaatggctaaagaaaatgctattattaaaaacttggcagccgtagaatctttagggtctgtatcagtaatttgttcagataagactggtacgttaactcaaaataagatgactgttgaggacatctatattggtggtaaagttttaaagccaaatgagctggatttgagtaatcaacttcaccgctacttgctttatgatgtagtgcttaacaacgatgcaagtttggccgaagataaggcaattggtgatccgactgagtcagccttgctggaaatgtatcgtcaagtgcccggaattgacttaggtaatggtgttttaggcttatcagaacaagaattacgcgaacattctaagcgtctggaagaagtaccatttgactcagatcgtaagctgatgagtactaagcatttgattcatactgtaccaactatttttgttaaaggtgcaattgatgtgctcttgaaacgctgtgtcaatattcgtttcggcgatgaaattcgtccaatgactgaagaagatcgtaaagaaattttggcacaaaacaattacttttcagaaaatggtttgcgtgttttggcttttgcttataaagaaagtgatgaagagctttctactgaagcagaagatggcttaacttttattggccttgtttcagaaatggatccaccacgtgaagaaagtgtagctgcagttgctcgtgctaaggaagccgggattaggactgtgatgattactggtgaccataaggtgactgccgttgcaattgctaagaaaattggtattttcaatgaaggtgacatggctttaactggccttgaattagatgctttgagcgatgaagaacttgatcaaaacattgagaagatttcggtttatgctcgtgtatcgcctgaaaacaagatcagaattgttaatgcatggcagagaaaagatcgtatcgtatcaatgatcggtgacggtgttaacgatgcaccagccttgaagaaggccgatgttggtgtcgcgatggggattactggtactgaagtatctaaagatgctgccagcatgattttggccgatgataattttgccacaattatcaaagctgttgctaacggtagaacagtttatgaaaatattaaaaacgctattggctacttgttatcaggtaacctttcagcaattatcactgttttatttgcttcactcgctggcttaccagtaccatttgtagcggttcaattgctctttattaacttggtaactgattcgcttccagctttagcaattggaatggagccaggtgatccagatattttgaaacgtaagccacgtgatcctaaggctggtattttggacaaagcctttgtgagtcaaattactattcaaggtttgttgatttcgattagtgtaattgctgcctttttgatcggactaaaagatagtcctgcagttgcaacgacgatggcgttctcaacattgacatttgctcggcttttacatggcttcaattgtcgttcacaacacagtatcttcaagatcggtttcaaaaataactggtacagtttagcagcatttgctgtcggaacaattttgttagccttgattttgtttgtaccggcgttacatagcttgtttgcagttactccgttaactgggcaagaagtaatgtggcttgctggcttggctctgattccaacgattttgattcaagcagttaagatgattagaaagtagaatattttagataatcctcatgaagtagtaactacttgatgaggattatttatattttaaacagattttatgtataaaatgcaaaaatatgataaaatttagcctgaataaaacaattttaggtgaataattatgaataaaaataaattatactttttaaaattagaaattcaaaatcatccgctatttgaggatgatcttgaattttcactggtcagtgatgcaagggttacttctaatacctctgatcgattaactcatttgctcggcagtttatgggtgaataatttaatcactctagtagggactaatgctactggaaagactacgatcatgaaactcttgataggaattcttcaaacagttgtgatggaaaagtcaattgatcaaactaagctaacggatgtgctaataggaaatgagcctattagtgttacaacttatttttatggaactgatcatgtagtttataaggatagtttagttttcaagttaaagaaaactttaagtaaaagctggcatattgagtctgaaacggtatatcgaaaaaaggtaactgttaatctttcaaagaaaaaattatttgatttcaaaaatataaaaccagaattagacagaaaagaattaggcgacctagcttcttcaattttgtcgtctgatgattcgatttttagagcgattatttcgaaaaataagtattatcctcaaataccatttgatactttgttctttactgactttaatgcattgatgtatggttctggcaatgtgcctggagaaattttaaactttttagatccaacaattgaatatcttaaaattgaaaacaagcctgagggctctggtgctactaaacaattgtttaagctgaagtttaaagggaaagatacagagattgcagaaaatgattttacaacgattgcaaaatacttgtcttctggtacagctaaagggataactctttatggcgaggtaattaatgcactttccgttggtggcatcatctttattgatgagttggagaatcactttaatcacgctattgtagattcttttattgagtattttactaatcctaaaatcaacataaatagagctactttggtatttagtacgcactatactgaaattttggataaaattgaaagaactgatgaagaatatattactaagagagaaggcaagattcagcttcaaagatattcaactgctgatgtaagaagcgatctaaataaagccgatgtttttgaatcagattatttaggtgggacagctccagattatgatgcctacatggctttaaagaaggctacagaaaaggcggttaaaatggatgagtaactctacagatctaatcgctattattgtagaaggtcatactgaacgagcaattatggaagttctattggaacacgatgcactaaaattcaacgaggatgatcttcttgaaggtgaagtaattagagcacgaaatgctaaaaagtttgctaaagaatttttgaataaagggtttagaagtagaaaggttaaaatttataggatacttgattccaaaaccgaaaagtttaatcttccagaagtgtataaaaagaaagtatccgaagtagtagaacttcgtactagacctgagattgaaattctagacattctttatcatcaagactatcagcgatatacaaataactataaaagtaaagtgaagcctagtgattttgttaagcagtattataacgatcttaagagtgtgaaatcttatgatgaaaattattatttttggaatagtcactatgatgatttaatcaacgtgttaaaacaatataagcaatatcattcatcggaaaaatgtattgctgatttattaaaagaataaagacatatggctaacttaattacgactaattcctaacccttttttctgagtgaagttcatgctataatcataaccaaagcaagaatcaagaggggtcgactttattaacagagaaaagccagacagctgagaggccgaaggttgactagtagcttgattagctgattaattgaaaataaaaagtaggttaatccggtatacgccgttatcgtcttcaagagaagcatgtttgatacatgcttaacgtaggtggtaccgcggtttaactgatcgtcctagacaatatgtctaggacttttttattggaggaattttatgacagatttagcacctaaatacaacccaaacgaggttgaaaaaggtagatatcaaacctggcttgatgaagatttatttaagccatcaggtaacaaaaaagctcacccatattcaattgttattccaccaccaaatgtaactggtaagttgcacttgggtcacgcttgggatactgcaattcaagatactttaattcgttttaagcggatgcaaggctatgatactctttaccttcctggtatggaccatgctggtattgctacccaagctaaggtcgaagcaaaattgcgtaaacaaggcaaagaccgtcaccaaatgggacgtgaagcttttgttaaacaggtttgggattggaaagatgaatacgcatcaatcatcaaaggtcaatgggctaagatggggctttcacttgattattcaagagagagatttactttagacaagggtctttctaaagctgttaaaaaggtttttgttcagctttacaatgaaggcttaatttatcgtggtgaatacatcatcaactgggatccagcacttcaaaccgctttaagtgatatcgaagttattcacaaagatgataagggtgccttttaccatattaagtatccatttgcagatggttcaggttatgtagaaattgctactactcgtcctgaaacgatgtttggtgatactgccgttgcggtagcacctggtgataagcgctacaaggatattgttggcaaagaattgatcttgccacttgttggtcgtcacattccaattatcgaagaccaacacgttgatccagaattcggaactggtttagttaagattactccagctcacgaccctaacgacttccaagtcggtaaccgtcataatcttgaaagaatcaatgttatgaacgatgatggtacgatgaacgaagaagctggcaagtatgctggtatggatcgttttgaatgccgtgaagccttagttaaggatcttaaagaagaaggttacttgattaagatagaaccaattgttcactcagtaggtcactcagaacgttctggcgttcaagttgaaccacgtctttctaagcaatggtttgttaagatgaagccacttgctgacaaagttttggaaaatcaaaagactgatggcaaagtaaactttgttccagaacgatttgaacaaactcttgatcactggatggaagatgttcacgactggtgtatttcacgtcaattgtggtgggggcaccgaattccagcttggtacaataagaaaactggtgaaacttatgtaggtgaagaaacacctaaggacattgaaaactgggaacaagatccagacgtacttgacacttggttctcaagtgcattatggccattttcaactttaggttggcctgatactaatgcggaagactttaagcgctacttcccaactaatgccttggtaactggttacgatattatcttcttctgggtatcaagaatgatgttccaaagtttgcactttactggcaagcgtccatttaatgatgttgttttacacggtttaatgcgtgatgaacaaggtcgcaagatgagtaaatcacttggtaacggtgttgacccaatggatgtagttgataaatacggtgccgacgcccttcgttggttcttgcttaatggtactgctcctggtcaagatactcgttatgatcctaagaaattatctgctgcttggaacttcattaacaagatttggaatgcaagtcgttttgtaatcatgaacttgccagcagatgctaaaccagctcatatgccagatgcttctaaatttgatttatcagatcgttggattttcgatcgcttgaatcatactgttagtgaagtaactcgcttgtttgatgaatatcaattcggtgaagctggtcgtgaagcttacaactttatttggaatgacttctgtgactggtatattgaaatttctaaggttgctttgaatggtgacgatgaagaattaaaggcaagaaagcaagaaaacttaatttggattcttgaccaaatcttgcgtttgcttcacccaattatgccatttgtaactgaaaaattatggctttcaatgccacatgaaggtaagtcagttatggttgctgaatatccaactactcacaaggaatttgaaaacaagcaagcagatcaagacatggccttcttaattgaaactattaaagcagtacgtaacatccgcatggaagttaatgcaccaatgtcaagtcaaatcgacatcatgattcaattagacgatgaagctaacaagcgcgttttggacgaaaatgctgattacgttgaaaacttcttacatccaaaggaattgactgtagctagtgaagttgaagcaccaaaattagctaagactgctgtaattccaggcgcacaaatttttgttccattaactgaacttgttaatgttgacgatgagctagaaaagatggaaaaagaagaaaagcgtcttgaagacgaagttgctcgttgtgaaaagaagctggctaacaaaggctttgttggtcacgctccagaagctgttgtcaacaaggaaaaggaaaagaaggctgactacgaaagtcaattagccggtgttcgtgaaagaattcaagatttgaaagagagtaaataattgaaatttactaaagctcaagaagtaatcgattacttatatgctttgcctcatttacatcctaaaaataatttgtcttttattaagcggttattgttggaattaggcaatcctcaagatctagttaaaacgattcacattacgggcactaatggtaaaggttcaacttcatactatttatcaaacctactaaaaaaggctggtcaaaagactggcctttttgtctcaccgtatgtctatgaatttaatgagagaatacagttaaataatcaaaatattagtgatcaggatttagttaaaacagctaatattgtgcagggtacttatgagaaattgcagcagcaggactcaactttttcgttagtaacctttgaatatgaagtcgcactggctttcgtctattttgctcaaaaaaagtgtgattatgctgttatcgaggtaggaattggtggagaacatgacaagactaatgtaattatgccagaagtaagtgttattactacaattggtctcgatcatgaaaaaattattggacctacaattcaggatattgcacgtgagaaaagcggcattattaaggcaaaaagaccagtagttttaggtaacgtgccagaagttgtttggccaattttgaaaagtaaagccgaagaagaacatgcgatagtttatcaattaggacgagactttagtgttttgcttgataatcaaattgtttatcaagatcacaaaagaaagctagtttttgctttacgaccacaagttgaagcctatgatattgccgttgcctgccaggcgttctttttgttgaaactgcctttatcaaatgaagaagttgaaacagcgattaatcaaacgattattccagggcgctatcaaattttacgagaaaatccgctaatcattttagatggagcacataatattcaggcaatgagtaatttgctggcagtcgttcatcgtatgacccagcaaaagcatggcaagctttatgctttagtgactatgatgaaagataaggatcttgagcaggtgtttagcttgtttgatgataaagatgaagttttactgacaactttatcttatccgcgagtagctaaaaaagatgattttccaattgatgtacaaaaaagatataattatgaaaaagattatcgagctgcttttacccagctgcgagatcacttgggagctaatgatattttaattgttagtggatccttttatttggttagtgctattttaaattggaaaggaaaacgtgatgcgcgtacaagggctagatgatgatattcaaggcattatctttgatatggacggtttgctagttaattcagagaagctgtattgggatgctaatattcaggcggcagaagaagagaatttgggcacgccgcgggatgcttatctcaagttaactggtgctacagttaaagagatgcaggatttttatcataaatattttaaaactgaagcagaccgtgatcgttttattaagcgaactgatgacttggtgtggcaatggactgatgagggaaagttaaagctgcaacctggtgttcaagaagcattagacgaatttgaaaagcgtggcttgaagatggcgattgcttcaagtaattatgaaaatgtagttcagcatgctatgtgggtgactggaatcagaaattattttgattttcatcttagttatcttgatgtacaaagaggtcacattaaggctaagccggcaccagatatttatctagaagcagctaagaaaatgaatttacctaaagaaaatattttagtttttgaagattcatcaaccggtgttcaagcagctgctaatgcagggttaaaatgtgtgatggtaccagatttgaaagcaccatctgttaaagataagcagaatgcaacgatgatttgtcaaaacttttttgaatttctgaaaaaaatttagctcttttttgcgtaataagtaatgagggggattttatgttaaaaagaaaaccaaatcattactttgtcaaaacagatttagagctattgacacaattatttgaacaactagaaaataaaggaattcatacgttgcaggacttaaatgtttttctgaaaaacacagggttaaattcgtttaatgatctattaaagtttattaccagttcagaatgctcggatgaacttgctattacggctgaggcagtactagatcgtttgcgctgcgcttcacctaagagaaagacaattttgacatctagcattgaagtaggtacgtatttagctgataagctgataggacacaagcaggaagaattgtgggcattgtatattgacaatagcaaccacattattgctgagaagaaactatttcaagggactttgaatagatcaattgctcatccgcgggaaatttttcggtgggcagttatttatggctgctctggaatttttattgctcataatcatcctagtggtaaattaacgccatctgcaagtgacttggaattaactgaaagtttacgtcaagctgcaaaaatgatgaaaattgatttcttagaccattttatcgtgggagaaggtcaatatttaagtttgcgtgagaaaaattgttttaaagttctttaaaatttgtgtgaaaggcgcctttaaagttatagtatgctataattagtcaagatttagagaccgcaacagttaaggagagatttttgtgtttggattaggtacaaagaatattggtatcgatttaggtacagccaatacacttgtttatatggaaggtaagggcattgttcttagagaaccttcagtagtagcaaagaatacacaaacaggcgaagtaatcgccgttggttcagaagcaaaagaaatgattggtagaacaccaggcagcattgtagctattcgtccaatgaaggacggtgtaatcgctgattacgatactactgcagcaatgcttaaatattttatggaaaagactgttggtaattccaagccttcagtaatggtatgtgttccttcaggtgttactgaagttgaaaagcgtgccgtaattgatgcagctagagttgcaggtgctcgtgaagcatttgtaattgaagaaccatttgcagctgcaatcggtgctggtcttccagttatggaccctactggttcaatggttgttgatatcggtggtggtactactgatgttgctacaatttcattaggtggaatcgtttcatcaacttcaattcgtcaagccggtgataagtttaataatgcgattgttaactatgttcactcaaactttaacttattaatcggtgaaagaactgcagaagacattaaaattcaaattggttcagcttcagttgaaaaggctaaagaaattgaatcaatgaatattcgtggtcgtgatttagtaactggtttaccaaaatctgttgatattgaagcagttgatgttgccaaggctattcaagatgtagttcaagacattatcgtagctattaaggagactttggaacaaacttcaccagaaattgctgccgatgttattgatcatggtattgttttaaccggtggtggtgcactcttgaagaatttgccagaagttatttctgaagcaactaaggttcctgtgtttattgctcaagatccacttgattgtgtagcaattggtactggtgaatcactcaagaatattgaagtaatgcgtagaagtcgcaaataataaaaaagccggctgttgccggtttttctataggatcaattcttaatgaaaaaatttctgcaaaataaaaagttattatcagcatttattatagtagttgttattttatccgttttgggtgggagtgttagcttgcgcaataggcgcaatacacctttactgattcaaagcttgggtaacgatgtcgttgctttaggtactagaattgttgatgtaccagtagggctcgtgtcaggcggattaaatagtgttcatgatattttaaatacgcaagaagaaaacaatcatctaaagcgagaagttactaatttaggccagacgaaggctcgcaattcagctcttgaaaaagaaaataggcaattgaagtctgcattgaaattaaaagatacgttaagtggctataccatggtcaacgcctctgttatttctcggtcgcctgatacatggtcagatttattagtgattaataaaggaagttcagctggaattaaaaagaatatggctgtcatgtgcgatggcggtgttattggtcgaattgtagaagcaaatgctgcttcttccaaggttgaattacttactactactgatgagtcggctaatcgcttctctgttcaagcggatgctgcgaatggaaaaacagtacatggtattattacagttacttccaataattatcttgcctttacacaggtggttgatggtcgcaaactgaaggccggcacgagagtatatactagtggtatgggcggtaactcaccaaaaggcttgttaattggtacagttactacgacaactcgtgattcatttggtctatctgatcagattagaattaaaccagcaggtgatattagtgatccatctgttgtaactgtaattgaaagacaggtggctaattaatgtctacgtttcgaaaatgggttttggcaattggcttatttattgcattggtagtagacggtgtatgtgcactttacttacatcagtttatgacttatgacaactttgcagcgtcaagcgtcattttgccaatcagtgtaatgttgattggtctgtttgatgatactaatgataatgaaatttggttagcattaggtgcaggaattgttgctgatatctatttttatggcattatcggtgtttatacagttttcctacctgcaagttgctggatctgtcaaaaaacagctcgttttttaccggaaatgttatgggctagattaattgtcgttttattaggaactgcagtttttgttgcgtatagttggctcatttttaatatggtgggtattagtgctgcatcagcacacgtattattaatgagcattttagtcagtttaggttgggcagttgtcttcttttttctcttgtattggatttggggcaatttagctcaggattatccattcttaattgatttaaacgcttatcgagtttaaaaaagacgcggaagattttttccaatgtcattaagttaagacattgacaattaatattagacttttaaagcactgatttaacatttaattggttaaattggtgcttttttcgtacaacaaataaggcatagcacagattctgcttttttaagctacgcgatataaataatatacagctgatttgggcttaatatttctcttgtccttgcggcctggtctaattggaatggtataatagctgatctgaataaggatccgttcaaaatcttgcgttaaagaagaagccaaatacatgctctgaataatcaagcatgattgcttgaaattgatggcatattgatacttgcaatgcttttgcggaatataggcctgtgcatcaatttgactgattgcattaaacataatcatatgggcataaatttccatttcaataaatttatcttgtttggaatggaactgtacactgcctaaagaatacttcaatttcttgaaggaggtctcaataccccaacgcagatgataaagctctttaattctttttagcggataattttttcgatcaagattggttagcacaacttcccattcttctttgcctgatttggcatcattaattctaaatttgcaggctcgaaattttattgtgcataactcgccaaaatcccagcttagatcctgggtatttttagagcgatacttaatatattggcgataatgatgctggacatggtgaatattctcactggctttatgcgtgatgtagtaatagttagaagtagttaccaggcaggaaatctcacgatcacattcttgatcaggcaatgtcgttatttctttaactccgccttgtccagccttagttcgtattatgtaatgacagttaggcaggcgattgcagttttcaatcatattgaaactagtgtagccacgatccattgttacaatatatggaccacaattcaaagctttaagcatttgaacagccgctttgcgttcatccatttctgatttaggctgaaaaatacaatcctggtaggtattattcaatagatcatataaggcattaacgtgaatttgacaatagggtttctttttatgagaagaagcttgtacaatgttattcgatttcggattccagatttgattaaagtcagagccatcaatggcaaacaaacggtagtgatgatcaaaaagttgaatattaaatagattttgattaaaaacagtcagaatatgtttaaaacaagcaggagaaagctggcttttgcgttgaacataggcagaagtactaactactttatcgttctttttagttgcatcttcgccaaaagctctaaagagttcactgtttaaattctgaccttgcatgttaattgtagttttaaggactgtcgctgcatctaaagtgcgtttcctggtaaaagcatgaggattattaataaaatcgtgaatatgatccccagtattattgataatttgatcaagacgttctagaatattcttatgaagggctttcataattaacaccatctttctggcaataattttgaaggtttaaaatatataatatataagataggcgaaaaggctggtcttttcgcctttattttatacaaaaaaagagatcgaatccaaatgattcgatctctaaaaaagcacccttaattgtcaatgtcttaacttaatgacattgagattttttctttcgcgtctttttaatccttaaaaactttgaagtgagatagcagcttgagcaataacagctgctaaagtaataattgccatgatccaagccattgcaatagttaatttttgaaaacctgatttctttttcttttttcgtgccataaacagccctcctatttgaacaatattttatgcttattaacggtttttttcaaatcaattatagtttagaataaaaagaatggaggaatacttatgctttatattttcctaattccaattattggcttagtagttgctttttttatcaataaaattttccctaaagcacagtttagagggtacgatgttatgccatttttctttctttcagcttgtggattaattactttacatatgaataaaccttcttttttaccttatggttttttatgctattttgtattagtgattgttgtgtcgctgaacgatgcgattagaaataaaaatatttctttaggaaaaacagttagaaaattatgggattatttgactgcctgtactgttttctggtatatcggacttttattgatgctagtgttataaaataaaattacttgtatatgcttaagtcgcaaaatttcaatattttgtgacttttttttattttgaaaaatcacaataaaaaagaaatttaaaaatctgtatttttttcttatgaatgtggtagagagtggggaattgtggtaaattatttagtggaagggggctagaccatgttcatgggtgaatatcaccacaatcttgatagcaagggtcgcctgattataccagcgaaacttcgcgatcagattggcgacaagatgatattcacgcgaggaatggaaggctgcatttttggctactcgatggaggagtggtcgaagattgaagctaaattagcaaaacttccgttgactaagaggaatacacgtaaatttatgcgtttattctactctggtgcgatggaatgtgagtttgataagcaaggtcgcgttaatctgacaacaacgttgaaaatgcatgccaaactcattaaagaatgtgtcatcattggtgtctctgatcgaattgaaatttggtcaaaagaacgttggactagttttgaagaagaagctaacgaagactatgatgatattgctgaaaatttggacgacattgaactataaaaaatatgaaattcaaacacaccagtgtactcttacacgaaactatcgacaatttgaaaccaaaaaacggtggtctttatgtagatgcaacttttggcggtggtggacatgctaaatatttgctcagcaaaattgacaccggtacgcttgtaggttttgaccaagatgaatatgcgataaaatcggcgaagttgaactttgcgaatttattacaactggatagtgagccaaggttagaattggtacatgacaactttagtaatctggaaaaggacctggtaaaactgggttactcagatggaatagatggcatttactatgacctaggtgtatcttcccctcaatttgatcaagcagatcgcggtttttcatatcgttatgatgcgcgattagatatgaggatggatcaaagtcaggacttagatgcttatcagttagttaatactttaagtcaaaaagaactggcagatattttgtatcaatatggcgatgaaaagttttctcgtcaaattgctcacagaatcgtagaaagacgacgggaaaagccaattgcaacaacttttgaattagttgatgtgattaaagatgcgattcctgcgtatgcacgaaggactggagggcacccggcaaagaagagttttcaagctttgcgggtcgctgttaatcacgaacttgatgttttacaagcttcgctagaggaagcaattaagatattgcgtccaggtggtcgaatcagtgtaattacgtttcagtctcatgaagacaagatcgttaaaaggatttttaagaagtattcagaagttgaggtgccaagaggaatgccatttataccggacggtatgaagccaacgctacgtttggtaaatcacaaaccaattgtagcctctacttctgagttagagaacaacaaccgctcacacagtgcaaaactacgggttgcagagaagttataaagaggaaaatgttatggctgatagctcagcaagaaaaattgaatatgaaccaagtagtagaaatggttcgcaaagacgacaacgaattatccttgatccgcgtaaagttccttatagtggcatagaaaaagctttgatgattattggaagcgtcattacgttgggcatgatgatctttctagtttcttctagtatttctgcaacttcggctcaacatgaattgactagaactcaacaaacagttgctaaggaacagaataagattaccgatttacgtcaagagattggggagttgacctctacttcacgtttaaataaaattgcacgtgaaaaaggattaactctaattaacaaaaatattaggacgattcgttaatgaaaaaaaacagtaatttaaaattacaaaaatccaaagcccacggctaccgctttacggtggggagatttctccaaatggccgtggctttggtttttcttgtatttacggctagatttttatatatcggaatatccaagacagttaatggtcaaaatttatcacagcgtaccaagcagctttataagcgcaatcaggtaattaaggccacgcgagggactatctatgatcgaaatggattaacaattgcggaagattcgcatttgtatacggtttatgcgattttagataagacttcgatcaactataagaataaacctgagtatgtagtgaataaaaccaagacagctgaaaagctggcacaggttttaccattgtctgcggaaaaaatttaccaatatttaacccccaaaaagaaggtctttcaggtacaatttgggacaggtggtagtggactgacattgcggcaaaagaaaaagattgaagcaatgaaattaccaggaattaagttcttggaaacaccatctagattgtatcccaatggtgtttttgcatcacatactgttggattggctcaaccaatttggaataaaaagactaatgcacaaaacttagtcggaactatgggaattgaagcctatttcaataagactttgactgggacagatggttaccggatttcttcggtagatgcatctgaatatcagcttccaaatagtaatcaggtttataagcctgctaaaaatggaaacaacttgtatttaacactagattctcagttgcagagtttgcttgagactcgcttaagtgaagtacagaaaacttaccgaccaacatcaattactgctacagttgaagacatgaagactgggaaaattttggcaacttctcaacgccctacttttaatcctcaaactatgaagggattaactaagtcgtatcgggatatcttggtccaagatacttatgaaccaggatcagttttcaagattttgtcattcgctgcagtagtcaacagtggcaattacaaccctaatgagtattaccggtctggttctgttaatattgctggttcgactatccatgactggctgacttcaggttggggcacaattccattttctcaagcttttgaacgttcaagtaacactggttttgttaagttagaacaaaagatgggtgctaagacttggaagaagtacttgaggaagttcagaattggtgaaaagacgggagtcagtcttccaggtgagcagccggggatgatttcgtttaaaacaccagttgaccaagcaattactgcttttggtcaaggcgttactgtgaatgtaatgcaaatgatgcaagcttatagttctttggctaataatggtcaaatggtaaagccacagttggttaataaaattactgactctgatggcaatacaattcaaggctatcagattaaaaaagttggtactccagtatatagtgctaaaaccagaaaagtaattgtggctaacatgagaaaggtacttaataagcaatcaggaactggttctgcttataagatgggaaacgccgatattgctgttaagacggggactgcgcagattgctaaccctaaaggtggaggttatctaaagggtgatagtaattatattttctctgttgttggtatttatccagcaagtaaaccacgttactgtatttatttgacaattaagcaaccacacttaattggaggcggagctgaaaagattttggcttcaattttcaaaccgatgatgcagagaatcatttcgattgctaaaaatgatgatgtatcaactactgtaaaagtaccaaacttaaaagctaaaaccgttgcacaagctgaaagtcaaactaagcaattaggacttaatttggttaaaattggtagcggtgatcggattagcaatcaaggagttaagagtggcgaaaagttagagtctgggtctaagatttttgtcaatacttcaggaaaaatcatttgtcctgatatgacgggatggacttatagtgatttacaccaatttgctagtttgacagatattaagttaagcataaaaggtaccggcactgttgcgagtcaaagcgtggctaaaggaacagaattaaaagctggaagaaaattaaacattaagttaaaggagtaactcagaatgaatatgatgttggcaagttgtattgccctagttagttcactggttttgacagtgatctttattccattgttgattaaatttatgcggtcacatcacgaaggacaagaaattcgtgatgaaggtcctaaatggcatcaaaaaaagtctggcacacctacaatgggtgggaccgtttttgtaattgcagcagttatttctgttatttgggtagctgctatgcagcacagcttgaataaagttgtttggattttggtaatcagtctcttaggctacggtattatcggtttccttgatgatggtattaagctttacttcaaacgtaatttaggcttgcgtgcatggcaaaaattagcattacagattataattgcaattttaattgtcttgattgctacaagtgatcattttcaatttgggttatatattccttttgctggggttgtccatagcttagttttatttgtggcatttattattttttggctggttggtttttcaaatgctgttaacttgtccgatggtcttgatggtttagcaacaggtttatcagttgtagcatatggtacatatgcctatatcgcattcaaacaaaagaattttgctgttttggccttttgtatgagtgtaattggtggtttaattgccttctttatttttaaccataagccggctaaaattttcatgggtgatgctggctcacttgctttaggtggcggtttagcaacaatcagtattatgcttaaccgtccctggtcattattgttagttgggattgtttttgtttgtgaaactgctagtgtaattttacaagtaatttctttccaaactacgggtaagcgtatttttaagatgacacctatccatcaccactttgaaatgttgggttggtcagaatggaaagtagatattgtcttctggttagttggattaattggcagtattttgtatttagtaatttggggataatcataaaatgaaggatattaaaacttataataataaaaacattttggttctaggcttgggtaaaagtggttttgctgttagcgaactccttttgcaattaggagcaaatttaactttaaatgataaagctgatttggagaaaaatgctaaggcacaagaattgaaaagtcgcggcgtgcgcgtaattggcggtcatcatccagttgatttgcttgaaaaagaacattttgattatttagttaaaaatccaggtattccctatgaaaatccgatggttcaaaaagctgaggagttgaatatcccgattattactgaaccagaagttgccttaagttgtagtgatgctccctatgtttgtgtgactggttcaaatggaaaaactactacggtaatgctgacacaaagaattttggaccatcatttgcaaaaatctggtcatcatgcttatgcagttggtaatattggcgtaccgatttctgaagttgtacctaaggcaactaaggatgatattttagtagttgaaatttctagtttccagcttttgggtgtaactgatattgatcctaaagttgcagcgatcgttgatatttacaacaacgtccacttagattatcacaagacttttgaaaattatgtcaatgcaaagttgaatgtaactagaacgcaaaacagtaatgattactttattgctaattatgatcaaaaagatattttggctaaggaaaaagaagtttcaccagctaaaatgcaaactttttctgagacagatcataatgctgattatttcattggcgatgaatatcttgaaagtcaaaacgaaaagattatgaagatttctgatattaaattaccaggtattcataatttgcaaaatagtttagtcgctattgcaatttctaaaattatgggcgctgataatgatgatatcgccgcagtattgagcacctttactggcgctaagcatcgtttgcaatatgtaacaacacttgatggctgcaaggtttataatgattctaagtcaactaatattgaagcagcaactgtagctattccatcatttaagcaaccggaagtattgattgctggtgggttagaccgtggcttcacttttgatgatttggtaccattatttaaaaaacatgttaagtcaattgttctttatggtgaaactagatatttgttagctgacgcagctagaaaagcaggaattaaggacattgtaattgttaatacactacaagaggccgttcctcgtgcttgggaattagttgaaccaggcgatgtactattgttctcaccagcatgtgcttcttgggatcaatttagaacatttgaagaacgtggcgattactttgttagatttgttgaggaattaaagactaaataaaatgagagttatttttacaggtggcggtacaggcggtcacatttacccaattatggcaattattgaacgtttgaaagaacgcggtattagtaaaaacgatgaaatcttatttgtaggtacacaaaaaggattggaatcaaaaattgttccagcagccggtgttaactttaaaacaattaagattcaaggctttaaccgtaaacatccgttaaaaaactttgagactatcaagctatttttacaagctactaaaagcgcacgccaaattttacgggactttaaaccagatgtcattttaggtacaggtggttacgttagcggtgctatggtttatgaagcagctaaaatgcatattccaacaatgattcatgaatctaattcagtggttggattagctaataaatttttgggtcattatgtggataaaatttgttatacatttgatgatgctgcaaaggaattctcagaaaagaagaaactagttaagacaggtaatccacggtcacaacaagttttaagcttgcacgaagaaaaaattgatcttgaaaaaacatggggattaaatccaaaaatgccaactgttttagtatttggtggatcccgtggagcattagcaattaacagaattatgcttaagtcattaatgatgctaaagcaaaaaccatatcaaattatttgggcaacaggtactttttattttgataaggtacaagaaaaaattaagaatgttgatattggtaataatattaaagttttgccatacattaaaaacatgccaggtctattgccagaaatgacttgtgttgtttcaagatctggtgcaacaagtattgcagaatttactgcattaggtgtacccgttattttgattccaagccctaatgtaactcataatcatcaaatgaagaatgcgcttgatttagaaaaagctggtgcagcattggttattccagaagatgatttaaatccaaataattttgtctcttcaattgaccatattttgctcgatgaaaagtatgctactgaaatgagcaaagcttctaaggctttaggcgtacctgatgcatctgatcaagtgattaaggtgatggaagaaatttcacgctaggaggtaggtgaggcagatggccaaaaagccagtaactaagattgatccaaggaaagaattgtctccgtacttgaatcatgaatttaaccaacaaaggaatagtcgaaaatcgcagaccaagatttctgcctcactctcaaatttacaggcagaaagacgacgatcattacgacgtaggctaggtctgataatgacggtttcagttttggcgatagctggtttaggatactatatttcacctttagcgaatatcagtactgttaaaataattggtgcagagcatttacctgctaaagaaattgttaaggtatccaagatcaaggctagcgataaagtttttgattacttgtttcaacaaaaagatttgagtcaaagattatcccaaaaatatccagaaattcaaagtgcacaagttcatttaggtcatattaatcaattgattttacaaattaatgaacgtaaaaccgtgggttacttaaaagatggttattcttaccgaaagattttggataatggaaaaataggtacgagagctctaccttggacaaaagtgaaccaagataaacctatttttgttggctataataaatcagatgagttaaaaaatgatttaaagttatttaacagtttacctaattcatttaaaaatcaggtaaaattattaagtgggaataccagacgaaattcacaaattattttagtaatgaaggacggtaatgtagtgattggcaatactgctactttgaatagcaaactaaaatattatgatactattagaattaaagctggtaaacatagccttattgatttagaaataggtgcatttagtagaccattaacttctagtgaaaagaaagcttatggcatatcgtagctgttttgcaagtttatttatgttagaattttttcaaggcaaatattaatgggggcttaattttggagaattcaaatcttttagtgggtttagatataggaaccacaagtgtaaaagccgttgttgcagattctggtaaggttatcggtgcagttacaacgccaaattcaggaatgcgacacggtcaaatagtagatattgatcaaactgctagtgcaattagtcgtgcattaaaaggtgtagcagaaaaaacaaacgccaagatttatagtgtagttacaggaattccggtagggatgttacaactggaaactgcaactggttttgctaatgttggtgaacaagggcaagaagtaaataatgatgatgtaaaaagaacgattagatctgcgattcattcagcagctaaggatgatcgtgaagcaattacatttttgccgagtcgctttttgattgatggtaaaactgaagttgatgatccaagaaaaatgattgcacgttccttgggtgttagtggaattttattaactgcacctactagtcctttgcacaatatcaagaaggctattgaaagagccggttatcataataatttctttgtgccaacgcctttagcaatttcaagtgtagcattgaatgaaagtgaaaaaacttttggttcggtaattatcgatcttggtggtggcgtaagtacggcaactgttattaaagatggccaaattaagtatgccaacatcgatttagaaggcggaagcgatattactaatgatatctctgctgttttaagtatttcgaaaaaggatgctgaacaaattaagttggactatggatttgcggatccacaatttgcctcaaaaaacgataaatttgctattaatagtgttggtgcaaatagtcagcaaatggttgacgaagtatatcttagtgaaattattaatgcacgcttagaacaaattttgactcgtttaggaaaaggtttagttaagcataatgcattgaagcaaccaggtggtattgtgattacaggtggtagtagcctattacaaggaattgatagtctgactgctaatgggttaaatgttaaggcccgaatttatgaaccagatcaaattggtatgcgtaatccgatttatacagctgcttatggtatcgtccactattcatataagatgtctgaagttgactatcttgttaatggcgtaatctatggttttggtgaacccgctgtggaagaccccgtttctcagccaaaaagtaccaagatttctaaaagtacgacttctaatagtgaaagtgaagctaaagaagcttataatagaagcaaaatgtctgccagaacagaatctgtgccagacgatgaaaataatactaagcaagaaaaaactaatagcttgaagagtttctttaagaaattctttgattaaaggtggttaatttaatggattttacattcgattcagacgacaataagaatgctgtcatcaaagtaattggtgttggtggtgccggcggcaatgctgttaaccgaatgattgacgatggcgtacaaggtgtttcttttattgcagcaaacactgatgttcaggctttgaacagcaacaaagctgaaaacaagattcaactagggcctaagttgacccgtgggttgggtgctggttcacatcctgaagtaggacaaaaagctgcagaagagagtgaacaaacgattgaagatgcacttaagggtgcagatatgatctttattactgctggtatgggtggcggtaccggtactggtgcggctcctgtagtggcaaaaattgcgcgtgagacgggcgcattaactgtaggcgtagttacacgtccattcagttttgaaggccctaagcgctctaaaaacgctgcagaaggtattactcagctaaagcaatatgttgatactttggttattatagctaacaatcgtttgcttgaaatggttgacaagaagactcctatgatggatgccttcaaggaagctgataatgtcttgaagcaaggtgttcaaggtatttctgatttgattacttcaactgactacgtaaacttggactttgctgatgtgaagactgtaatggaaaatcaaggtgcagctttaatgggaattggccgtgctagcggtgaaaatagaacagttgaagctactaagctggcgatttcttcaccattattagaagtttctattgatggtgctaagcaagtgttacttaacattactggtggacctgaccttacattatttgaggctcaagatgcttcagagattgtttctaaggctgctggtgacgatgtaaacattattttcggtacttcaattaatcctaacttgggcgatgaggtggtagtaactgtaatcgctactggaattgattctaaggctgaagaagctgcttctaagcaattaccaggtcgtagccaacaaattaaggctcaaccagttaaagaaaaagaagaagctcctaaggctgaagaacctaagcaaccagttgatcgaccacaaacagttcagcctgctgccgaaaaacaagaacctgagcagcctaagcaaacgatggttgatccaaccagtgtttggggactaaatgatagcgaagacaatcaaagaagaaatacccaacctactgagcctaagaaagattatgagggttttgatacttttagtgatgaagaccaggatagtatttctcaaattgaaactagcgctcaggacgatagtgatgataacagtgatattccattttttaaacatcgtagtgaaaactagttttggaggtagtataaatggcttttgataaattaggaagatttttcggaatttctaatgatgatgaattagaaaatgacgaagaatatgcctcacagactaaaaatgaaaatgaagacttgcctctgaactcagttaatcgcgataatgtggtttcaattaaatcaggcttgaattcggctaaaagcaagattgttttatatgaaccacgggtatattccgatgctaaggatgttgcacaaaatttattaaataataaagcagtagtgattaattttagcagaatggaagacagttcagcacgtcggattgttgatttcatcacgggtactgtatatgcattaaatggtgaaatccaacgtattggtgataaaatctttttagcaactccaccaaagtttgttactgatggcaaaattagtgatttagtggataagaaagacaatttaagctaatggttaatatattaaatttaatctacttggcactgacgtggattttatggctttatagtctgctgatcgtgattgatgcaattatgagttggctaccaatgctaagtaattctgttgttggtcgctttttagacaaggttgtaaatccatatttaaatttgtttcgaaaaggtccatttgcgagattagcttattcaactggaattgatgtctcgccaattattgctttatttatcttatatttcattcaaaactatgttttaagatggatatttgatattttattgaggatgatggtgtaatggaacgcagacaggcaagtaagttttacccacattttaatcaagaggaaagaccagtaattgactattttactggtctttttaatcagctgatttttaagcatgagccaattttgactgattttttggatccgggaaaacgagcaattttaagaacaattgttggtaatgatgcattttttcaagagtatggtggctatcctaatgcagagaaaaagcgagtttatttaagtgaagaatggcttaatctgcgaccgagtgattatcagattcagccgtatgaaattgaatatccgcaaaaatttactaaaataaatcatagtgttattttaggcaccttggcgaattcgggtattgatacaagtatttttggcgatattattaatgataatcaaggaaaatggcagtttttcactaaaaaagaaatgacggaattttttgaagagcaaattgaccgcattggcagagcaaaagtaaagctgagaccgattagcttcaaagaagttttggttcctgaggatgattcgattgaaaaaacgaaaatagttgcctcaatgcgaattgatgctgtattatcgggtattagcagacaaagccgcggtcaaattcaaaagatgattaatagtcagctggttaaattaaattggcatgaaatagcagattctaatataatgattaaagaagacgatgtcttgagtttaagacactttggtcggattttgattgaggatgtttcgactacaagaaaaggtaaatataaggtggtgctcagactttggcagacaaagaaacacaattgaccccgatggatattcacaacaaggaatttaaacggcgtggtcgtaatggatatgatcgtcttgaagtagatagcttcttagatcagattgttgatgattatggtgatacacttgatcaagtggttgacttgaagaatgaagtagtttctttaaataaaaagttaactgatttacaagaaaaagtagatgattatcaagatcaagttaatgaatataacgaaaaaaagcgttctttaaataaatcattaatttcggcacaacaaactgctgatgaaattagagagaaagcagaagcagaggctaagcagattattgcggatgccaaaaagcaagcggaagataatattaacttccaaaagcatcaacaagatactatttctacggattatatgcgtgtaaaagagcaagttagtgaatttcgtagtaatattcaagaaatgctacagactgaaatcgataatttgaatgatgaaaagtggcaacatgcattggatgattacttcaacttagagcgttattatccagatgatggttcggagccagtaagtgctgatgatgaagacgttgaagatgaagatgttgacaatgatgatgaaaatgacgtaaactcttctcaaggccctgatgatttggagttggatcaaccggatgattctgacgatgcagataatgaagaaaatgctgcacctaaaccaatgaccggggacagtccaagtcatgaaacaattaatgttaagcctgaaatgaaatcagatcctttaggcccaacaattgtttttcctgacgactataaaaaataagcatattagattgacagtaaagcttgaaggcaattcagcgagctagtgatggtggaagactagcataagagcctaagagctgatcagctgcctaattaatctaaacggtatttgcacgttacgcaaagttaagtggaacttataataagttcaatttaggtggtaccacggttagcctcgtcctaattttaggatgaggctttcttttttagaaaggaattttgttaatgagaatcaaagatacccttaatttaggtaaaactaaatttaagatgcgcggtaatctacctgttcgtgaagctgaatggcaaaaagaatgggaagataacaagttatatgaacaaagattaaagttaaacgaaggtaagcctcgttttgatttacatgatggccctccatttgctaatggtaatattcatatgggacatgcgttgaacaagatttctaaagacatcattgttcgctacaagaatatgaacggttattatgcaccatatgtaccaggttgggatactcatggtcttccagttgaacaacaattagctaagcaaggcgttgaccgtaagacaatggatcgtgctaagtatcgcgagctttgtcgacaatatgctgaagaacaagttcaaaagcaaatggccgactttaagcgtctaggcgttatggcagattgggataatccatatattaccttgcaacatgactttgaagcacaagaaattcgcgtctttggagaaatgtataaaaaaggttatatttataagggcttgaagccagtttactggtcatggtcaagtgaatccactttagctgaagctgaagtagaataccatgatattaaatcacctagaatttatgttgcttttccaattaaagatggtaaaggtatcttagattcagatgtttcattagtaatttggactactactccttggactattccaagtaacgtgggtattaccgttaatccaagatttgactactccttagtagaagttgacggtaagaagtatgtaattggttcagatcgtttgccagccattgcagaagacttaggctggaaggactacaaagtacttaaacaattaaaaggtactgattttgatgggatgacttataagcatcccctttatggtaagactggtgtaggccaatatggtttggtaatgaatgacacctatgttactgatgatgacggtaccggcttagttcacaacgctactggttttggtgaagatgactaccgtgttggtcaaaagtatggtatcccggtcttcagtccaatggacgcacaaggtcgctttactaaagatattccagatccagatcttgtaggaatgttctatgatgatgctaacaaggtggtagcagataagcttaaaaaggctggcgctttgctcaagttaagcttctttactcactcatacccacatgattggcgtactaagaagcccgttgtcttcagagcaactactcaatggtttgcttcaatttctaagtttagagatcaaattctggatcaaattgaacaagctaactttattccttcatgggggaagactcgtctttacaacatgattaaagatcgtggcgactgggtaatttctcgtcagcgtgcttggggtgtaccattgccgatcttctatgcagaagacggtaccccaattgttactccagaaacgattgaccatattgccaagatctttgaaaaagaaggttcaaatgcttggtacactcatacagctaaggaactgttgccagaaggctttacttcagaacattcaccaaatggcgagtttactaaagaaaaagatattcttgatgtttggttcgactctggttcatcttggtcaggcgtaatggaaaaacgtgatggtttacactatccagctgatctttatcttgaaggtagtgaccaataccgtggttggttcaattcgagtttgattacgtctgttgcagtaactggtaaggcaccttataaagaagtattatcacaaggctttgtgcttgatgataagggacacaagatgtctaagtcacttggcaatgtaatttcaccaaacgatgtaattaagaagatgggtgctgaaattattcgtctttgggtagctcaagctgatactacttctgatgttgcagtctcaatgggaattttgcagcagtctgcagaaagttaccgtaagatcagaaataccttccgttacatgttggccaacactagtgattttgatccaaaagaaaatcgcgttgcttatgctgatcttcgttcagttgatcaatacatggaagtgaaattaaatgacttagttaaagactgtcttgctgcttacgacaagtttgattttactactgtcttcaagaaggtcttcaactttgtttctaatgatctttctgcattttatcttgattttgctaaggatgtactttacattgatggtgaaaacagccatgatcgtcgctcaatgcaaactgttatttacgacgctgctgttaaattggctaagatcttaacaccaattttgccacacactatggaagaaatctggggcttcttgaaagaacctgaagattacgttcaacttgctaatatgccagaagttgaagaatatgctaaccatgatgatttgcttgaaaattggggtaaattcatgaagttgcgtgatgacgtcttgaaggctctagaagatgcaagaaataagaagttaattggtaaatcgtttgaagcaacagtaactatttacccagataaggaaactaaggcaatgctccaagacttggatgctgatttcagacaaattctaattgtatctaagttaactattgctgatggtgaagcacctgataatgcaaagcaattgaataatgctagtgtagtagttgaacatgctgaaggcgaagtatgtcctcgttgtcggatgattagaactgatattggcgtagatccaaagttgccaatgctttgtggtcgttgtgctaaaatcgttgaagcagattacccagaagctgttcaagaaggatttgaaaactaatgcggttaggtactgtaaaacaatttgatgaaggcagtagctatggctttattgaagatgatcgtaatcataagtcatattttgtcttctataaagcaattaaagaggaaggctataaaactttgcaagtaggtcaaagagttaaatatcagttagctcaaggtaaaaatggtctgcaatgtgtaaatgtttatttagcctaaaaaggagctgggattttggatttaaaggaaacagaaatctcgtcacagcagatttttcaaggacgtattttggatctggctgttcgtacaattaagcttcctaatggtgaaactgcaactagagaagttattaagcataagcctgcatcggctgttattgcaattaatgatgaacaaaagatgttgttagtaaagcaatggcgggaaccaattaagcagattactttggaaattccagctggtttggttgattccactgatgcaagtccgcttgatgcaatgaagcgtgagctgaatgaagaaggtggctatcgcacagattactgggaaaaggtcagtgaattctattcttctcctggtttttgtgatgaaaagatgtatcttttctattgtgataccttaactaaattgactgataagcgggcactggatgcagatgaatttttaacttctagttggtatagcttagatgaattaaaaactttattggctgaaggaaaaattgttgatgcaaagacaatttatgcaattactgtttgggagaatatgatgttgcgtaatgctcagaccgataataaggattagttatggtagaaaaacgctctgattatcgtaaaaggcagaaaaaaagcctacttaataagctaaaatcttccttttctgataatgattcagaagaagtagatgtaaatcctgactttaagcgggatgactctgaagaagaacctagaagacgccctctggctggggatggacaagaattttatcagcataatcaatcgagtgataaggaaacgattcgccaagagaagtctttaagactgaaaaaaagattgaatcgtgctatcctgatagtgattgttttaattatattggtgctattagcactatttcatttatagtggaaatgaggaaataaattgaagattgcgattatcgtcccaatggcggaagaagctgaattttatcgtgatcatttccatgcagaaacaaaagaaatgttcggatcaacagaattcgaacatttttctgttaatggcaatgatgtatatttaggtttaagtggtatcggtaaagtgaatgccgctatgaatctgactagtttactaactaaagaaaaaattgatgtaatttttatgactggttctgctggatcattacaagatgatgttcatcgtaaagatgtgattttagtaaatgattttgcctatcacgatgctcactgtgttagtgccggtgaatatgtagaaggtcagattccaagagagcctgctacctttaagttgaattcgcctgaaagggaagcatttaagaaatatttaggtgaagaagacgtagattttaaggaagggcttgttgttactggagatacttttgttcaatcagaagaacaaaaagagttaatcaagaaaaactttccagaagctttaggagtagaaatggaaggagccgcttttgcacaagttgctcgtcattttaaaactccgttggttgctatgcgtgcaatttccgataatggggatgctaatgcagacaatgattttgacaagtttgtcaaggaagtcggcgctaaggcagctaagttaattagtgattatgtagaaaagatgaattaaacgtgcgtgaaatttatttagataatgcggcaacgacaccaatgtcacccaaggtaattgatattattaccgatgaaatgaaaaatgattttggtaatgcctctagtacctatgaattaggtcgtagggccagaaatgtaattgatcgagctcgtcaccagattgctcaagatattaatgctcaagatggagagattatttttacttcaggtggttcagaaagcaataatacagcgattcttggaactgcctatgctcgtaaaaatattggtaaaaagattattactacgccgatcgaacatccctcggttcttaatccaatgaaacgtttggaaaatgagggctacaacattgtctatttgaatgtcgatgaaaacgggcaaatttctttagaacagttaaaaaaggaattaacgccagacactattttagtatcgattatggccgttaacaatgaagttggtaccattatgccgctcaaagaaatcggggcaatggtaaaggactccaatgcatattttcatgttgacaatgttcagggaatgggcacaattaaaattgatgttaaggacatgaacattgattttctgtctgtttctgcacataaaattaatggacctaagtttttaggctttttatatgaaaatgcggatatcgatattccaaatttgattttaggcggtgagcaggaaaccaaacgtcgagctggaacagagaacgtaccaggaattgccggctttggcgaagctgtccgtgaagtatccgagattggtcgtgatgctttgcaaaagaaatatgctcattatcaagacattattttaaaggaattagacgatcatcaaattaattatgaaattaatggtgggtatggtccgggttactcacatcatgtgcttaatctgcatctcaatggtgtatctactacttctttacaaacaaatcttgatttgaatggatttgccgtgtcaggcggttcagcatgtactgctggttctttggagccatcacatgttttaattgcttgttttggagaaaattcaccaagaataaatgagtcgatccgaatttcatttgggcgttataatacggatgaagaaattgagcaattcgctcaagaattagtaaaaattgtacaaagaattcaatctaaaaataaatagttgctttcaaaaagaaagtatcttattataaataagtgaggaaaattatggcaaatacagttgtgattaatggtgataaacgtaagtttactttgaatcttgagttgaagctttatgctttgattgatgctggctttgtgaagacagctaagggtaattttaattatgaacatcctctttacaatgattcaccttataacgcgcctactaagttaaagatgaccattaataaggacttgtcgcatttaactatggttattactgatcgcaacggtttgcagaaggttaatatttttaaaaataagcaattagctcctactgtagaacttttagattatattttaaaggatcttgaggagcgtaagattttgcttgaagtaaaggattgattgaataatggttgacaatagcaagactagagtagttgtaggtatgagtggtggcgttgactcgtctgtttcagcacttttacttaaacaacaaggctacgatgttgttggtgtctttatgaagaattgggatgataccgatgattcaggcgtctgtacagctactgaagactatgaagatgtaaaaaaggttgccgataagattggtattccatattattcaattaattttgaaaaagagtattggcaccgcgtttttgaatatttcttggatgaatacaagaagggaagaacccctaatcctgatgtaatgtgcaatagtcagattaagttcaagtcgttcttggagtttgcgatggacttggatgctgactacattgcaatggggcactatgctaagactgttaaggataccaatggtgttactcatatgatgcgtcctaaggatggtaacaaggaccagacgtactttttgagccaattgagtcaagagcagattagtaaggttattttccctctagctaacctaactaagccacaagttagagagattgctttggctaatggtttagctaccgcgaagaaaaaagattctacaggtatctgctttattggtgagagaaactttagaaagtttttaagtgaattcttaccagctaaatcaggtaagatggtcactcctgatggtaaggtagttggtgagcatgctggtttaatgtactacaccattggtcaaagacagggcttgggcttgggctcaactaaggaatcaactgatccatggttcgtggtcggcaaggatcttaagaagaatgaattaattgtagagcagggctatgatagtccacttctatatgctagtcgcttgaatgcaagtgatatgtcattctttactggtaagccagatcatgattttgagatgcactgtactgcaaagttccgttatcgtcaatgtgatatcggcgtgactgttaagtatcatgccgcagacaatactgctgatgtttactttgatgagccagctcgtgcagttacaccaggtcaagcacttgttttatacaagggtgaagaatgtttaggtggcggtaatattgatgctgcttaccaagaagaaaagcaattacaattagtttaaaaaatatgcaaaaagagcgttcgatttttcgaacgcctttttctttgtgctaaactattcttattgattagacaattagggggatttaagcaatgcaaatttattttgttcgtcatggcaaaactgagtggaatttagctagtcgcttccaaggaggacatggagattcaccacttttgccacaaagcttagaagatataaaaaaattaggtcatcacttgcaaggaactaaatttagaggaatttttgccagtccgcttgatcgggcctttaataccgctcagggcatcgatgatgcaatgaacgctaacttacctgttgtgatcgatgaacgactcagagagtttaatttgggcgatatggagggaatgaagtttggggatgcagagaaaaaattccctaaacaaatggataatttttggcaccatccagataaatatgatccgactgaacttcatggtgaggattatccacatgttattgctcgtggaaaagcatttgctcaagaaatggcacaaagatttcctgacgatgatgataagattctagcagttagtcatggtgcggcattatcagctattatgggtggacttttaggctatccattgaaagatattcgcaaaaatggcggccttagcaatacctctttaactgtcttagaaacactagatggcggaaagacttttaaaccggtagtgtggaatgaaactagttatttaggacgtaaattatcgaagacggactcgttataatggatcaaaaaatagcgcaactttatgatgaaggtaaagtagaacaagccattcatcttttaatcaaaaaaatcgatcagcatccacaacaagttgctaattatttgcagctatcgacgtatttaattgagcaaggaagcttggatcaagcacagaagctattggagcaggcccagcatctggttaaagagccacaagaattaaattataatctggcagtgtgttattacatgcaaggcgattttgataaagcactggctttattagatcagatacctaatgatgacttaactctttatcaaaaggcactaacttacttaaaattagggcaaggccaaaaagctttagcttatgctttgacgatcaaaaaaattgatgagcgaattcaggaattgctaggcgatatttggttaagtttgggtgagaatcaacaggctcagcaaatgtatttggcaattcctgataataagaaaaatgcgaaagtttattttttactaggtgtcactacattagaaaaagatcgtgaccaggctcaaaaatattttgctcaagctaagcagatggatgctaagtattatcaacaagcaatgaatcagtatgcttcaattatgaagatgctaaatgacaaggaaaagaaaaattatgaatgaatttaccggtaaggttaacgggattgtttttgaaaatagtaaagacttgtataaaattcttgacgttgaaattatcggcactttatccgattattctcgtcccgatattaaggtgacagggaattttggcgatattcaaattaatagtagctatcgcttcgagggtaaactagtaatgcatgaaaaatttggcttgcagtttagagcaaataactataagcaagtattgccacatgaagagggatctttaactaagtatttgagttcgaataagttccctggaattggtaaaaaggctgcgactacgattattgatgaattagggctaaatgccttagatgtattgaaggaaagtccagctaagattgataagctttctttaactagaaagcaaaaggatagtcttttggcaggactaaatgcgatggattcttattcagaagtaattttaaaattggctaaatacggcattaataagcgtattgcaggacgggtttaccagctttatcatggtgaagcattagcaaaactagagaaagatccttatgcagcagttaatgatatttcgggttttgcatttaaaaccgcggatatgatgggaagccaattagatattgctagtgatgatccacgtagaattaaaggtgctgtttatcaagtattactcgatgctttaaatggtgagggagatacttatgtaggcttagctgagttattaacagaagcaagtaaattgcttcaaatcaatcaattcgacccaattgctagctgtattaatagtttacaagaagctggcaaagtaatagttgatggtgagaatgctgctctacaaaatatttatcaaacagaagttgatattgctcgcttgatgaaaaacttggtagaaaaaaaagaagataaaaaaagagaacaatatgatgataaaaaggtagagcaagcaatcaaggatgctgaaaaggaacttaagattcactacgacgatacacagaagttggccatcaaaaacgcagttaaccaaccgatttctattttgacaggtggaccaggtacaggtaaaactactatcattaatggaattttattagtattacgcaagctggctgagattccttcctccgctctttacagtgaagatcctccgtttttactagcagcaccgactggacgtgcagctaaaagaatgggtgaaattaccggaatcagtgctaaaacaattcaccgaatgttggggttaggtattggtgatactaacactcaggacttgaatgagttaaatggtgaaatcttaattgttgatgaaatgtcgatggttgacatgttcctttttaaacaacttttggcaagtattcatgatacgcggcatattgttttcgttggtgataaggatcagttaccttcggttggagctggcaatgtcttcagtgacctgattaaatcgcaagcgtttccaactactattttgaagcagattcatagacagggtgatgattcaacgattattactttggcgcatgatgttaatgagggtaaagatcagcaagcattgtttaagaaaacaaataattattcttttattagctgtcgtcccgaattagtaggggatgcagttggacaaattgttaaacttgctttaaaacgtggatttgcaaaagatgatattcaagtgcttagcgcgatgtatcttggcaatggtggtgtaactaatcttaataatgttattcaggcaattttaaacccatctcagcctaaaagtaaggtattagaagcacataatgaagttttccgaattggcgatcgtattctgcaattgcaaaataatcctgaaaaagatatttataatggacaaattggtaagatcattagcattgatgaagatgatgccaaggaatgcatgattgcagattttgatggaagagaagttgccttttctagaaaagatttaaatgatctgacccgggcttatgcaatcactattcataaatcacaaggttcagaatttccattggtgatcttgaatctaaccatgcagaattttgtgatgctaaaacgaaaccttttgtatactgcaataacgcgagctgagaaaaacttagtattagttggtgatccacgggcatttgtggcagcttttaagacgccgggaaatgatcgtaagactggcttagcagcgaagatttgtcagcaattgggtattacaaaatcattggataaatctgatcaaagcaagcagcacgaaaaagctcaagaaatggagaatgaaaccgataaagcagaagtagcagaagattttgttctaacctcggaaaaaatatattctggtgaaattgatccaatgattggaatggaaaatatcaaattataaggataaaagccccttgaattgttaaaacaaggggctttttcattatacaaaatcatggtataattattgttgtctaaacatacgttccaaaatatggataattaacatggatattacaataattacactaacaataggcttattaacctattatttttttcaaaagcgaaaaaagaagaaaatgaaaaaaatagaattatctgtaacagataagaaagaaataactaaaattgaaaaaattgcaggcaaaagattaccataccgttttcctaatcataagaacttgacctttcagatcattgaattaatgcgaccgggttatattaagcgacgcatttttgacaataaaggccattgtcattatttgattaagtactatttagatcgttcagtggcggaattagttgaatttggtgagacggatggtcattattggcgtaagactagttggaatggagaaactaaggtaacttaccattatggcaaacatgaattcaatgagttagacgaaattacaaaaaatttgcgctattatggctcaatagtcaaagaaggtagaaacaaaattttgcctttggaaaatgacttaaatcagtatgtgaatgagttagaaaatcatgctagttatcaaaaagcttggattacacataaaaaagtaactgattcacaaactgttcatgatgctatgatagttgaaaaaactttgttgaataataaacgtgatttgaaacgagctttggctctgcaaaatgttttacgaattcgggcaattaattctggctataaggtttacaatcaaaaagtaaacgcatttcagaaaagaatgactgaactacatttgaatcaaataaaacatttgcgacctatgaatattttatctcaacgtgatttgcgccatcttagcaatctcttggcaggcgctgccgcagaagaattagtgaattctcgtttacgtgaagtgcagacagggaaagaaataattcataatttactgttaccatatccctatgaaaaaaagaatagtttagggagtaaccaaattgatcatgtgataattacgactagcgggattttttgcttggaaaccaaagcacgaacaagtaaaaatggacagtataatgtgcaggctgattatgatcagatagccgatcaagtggccaagcataaagaaagtattaaatatgtcctagaaaaaagcaacaacccagtgattattaatttattgagacgcttgccaaatatagatcaattaatcagaaacgtggttgtatttgtaagtagaacagatgatgagttcacattgactgattcgaaccgttatcaaaaaatggaaatagatgttgtgcaattggcagatattcagtcgttattagtcaaagctaaaactggaattggattacagccagacgaaattgcagctatcaaagaagaaatggacaatagtaaacaattgcaagaagaaaaaaattatcaagaaaatgttctattttttgaagatcaggagtcaacgttaactcaaaagcaggtggaagagcaattgtatcatgctaatcaggtgattaaacatatcgatcagattaatggacttcttggtaattacttgcaggaagcacgggagtggcaaaagcagtatcaaaaataccgttattggaagaaattttatgatcaagtacatgatttcgttgatcaggaccaatattatcaaaatcataattcgaaaagagatattttagataagatataaaaaaggaagaatttggaattcttccttattttaataaattaaaatgatcaactttaaatgttactttgaagggctgcttttcaatatcttcaccatcaatttgagcatattcacttttattggtttgaactaggatttctttagcttcaatataatgaaattctggtgcattaacgtgtgaaccatctttgatcagcttaccaaaaagccagagaaacttgcgtaaactcggtttttcaacaattactgtatcaagatggtgactgtaaatgtccgcttttggcaaaatagcaaaaccaccgccaaagtagggatggttagtagtagtgacaaagtatgcatctccgtaacgaagagtttcgtttttagttttaacagtcactgtaaaggtatcctgcttaattagtgccttgattatatttaggccataaatcatatttccagaattgaggtgattgaggtgtttttttaattgctcatgattactctgatgaacaacaaaggcatcaaaaccaataccgaaattattaacaaagtaacccttaggaatttgtttaatatttgatgtgaaaaaaccacaatcaacttgttccggttcaggatctcggagcaaattgttgattaattgcctgggatctgcggttaatccagcaccacgggcaaaatcgttgcctgttcctgcaggcaaataagtaatagctgtctcaggataattagaagtctttattccatttaaaacttcattaaaggagccatctccaccaactacgattaaaacatgttcagaagagagatgtaaattagcgtaattttgtgctagaacgactaattctccaggataatgacttttttgtcgcttaaaaggaatattcatttacgcgtggtgctagttaaatcgttttagttaataaaaaagtccaatcttgttagactcgacttgtaaatagtaataatagaaaagagtctgatctgattgaactgccttaagcttaagcgttttagccaccatttacaagttagttttaaagatttagtgataatttgtcggcactggtatcgtttgtatgcaccggctgagtttactcatcggcgaaatattgatcaaattaaaactacggacagtctgattttggctttacttatctggcaagctaagacaggaattgaatcacaaagaagattctgtgaatgtttcaattgtttatcacactcacgttttaatcggcgttcacgtcagctattgcaattgatttatcagatacggcaagaaatgaataaaaaggttgacctgaatggacagttcttgatcattgacagctttccggtacctgtttgccaaccaattcgaaactatcgtgctaaaatttttcgcggttatgccaacattggttataaggccaccaagaaaatttacttctatggtttcaaagttcatgccattgttagcgatgacggttacattcttgattatgtcgtaacaaaggcatcagttcatgatgccagggagacagttgaactgatagaaaatacccatccatctaattactatcttcttggcgacgaaggctatttaggcaaagaactgcatcaacagctaaaacaaatgggttacgaactttggacaccatatcgtaaaaatatgacaggagctaaaaagcacaatgatcatcaattgatggctattcgcagaacaattgaaagcgacttttcgcttctgacctattacaatgccgagaacaatcgagcacgtagtctgataggctttcaaagccggttggaaattgcaattttagcttataatttggcttattgtctagaacgatttaactagcaccacgcgtattcatttcttttagtatatcttgtaattctttatcagctttaatagcattgccattcccagcgacctcattaactaataactgaactttaatttttttatgcatattattcattttctaaaataaaagactccctaaggagtcttttttactatttcttttcgataatgattggtaaaatcataggccgtcgttcagtcttggaatacaagaagtctgaaagattttcggtgatcgcctttttaatgtcactttcttttggtctatttgatttagccatttcatttctaagcacatgataaacatgcttttgcgcttgactaattaactcagttgattcacgcatgtagacaaatccgcgactgagaatatcaggaccagctaagactcgcttgtgcttataatcaactgtagcaactgcaacaactaaaccttcttcagaaagaatttgacgatcatgaacaacaacgttgccaacatctgcagtaccagaagtatcaacgtaaacgtcacctgcaggaatatgtcctgtgattctagcgccatcagggccaaagcagacaacttcaccattagataaaacaaaagtgttttcagcgggtacaccggcttgttgagcaagctgggtgtgaataacctgcattctgtactcaccatgaacaggaatcatgtacttaggcttaactaagcgaaccatcatctttaactcttcttggccgccgtgtccggaagtatgaacgttatttactcttccgtgaataacatcggctccgccttccattaacttattaattaagtggttaacacttaatgtgttacctggaattgggttagaggagaagatgactgtatcaccaggttgtaagctgatttgacggtgagtaccattagcaattcgcgataaagcggctaatggttcaccttgagaaccagtacataaaatcattactttttcaggtggtagtttgttgatctcatctgcgtcaacaattagatccttaggcaaatttaagtagcccaagtcgaccccattatcaacgccattttccatactacgtccaaaaattgcaacctttctaccggtatcaattgcagcttgaatagcagttgatacacgataaagattagatgcaaaagtggcaaaaataattctaccgtggattccagtgatgatattatgtagtgacttagctacaaatcgttcagacttagtaaattgtgttacttcagcattagttgaatctgagagaagagcaagtacaccttcattgcctaattgagccatcttttgaaaatctggtgcaggttgatccattactggtgttaagtcaaacttaaagtcaccagtaaagacaacggcaccgagtggtgtatgaacggcaatacctaaagtatcaggaatagagtgagtagttctaaagaaagaaacggaaagtttcttaaacttcaaaacagtatcctcatgctcttcgtgtagttcagttgtctttaaaattccgtgttcttccaatttgcctctaattaatgaaagggcaaatggtgtcgcatagacaggaatttcaggaattttttctaacaaaaatggaataccaccgatatggtcttcatgtccgtgactaaccacaagagctttgattttcttacgattcttgattaggtaagaatagtctgaaataacgtaattaatacctaataggttatcttcggggaatttaataccacagtccatgatgataatttcatcctgatactgaacacaatacatatttttgccgatttcatgcaaccccccgattgcataaacggctacttcattatttttaattcgcactctttattacttcttgtcgaacgttgttaacttaaagtcagcatgttctttttcgtaagttaacgaattaccagttaattcttggatgagttcaatgttatagggggtactgtcctcaaccatacttcttgcttcgaccatgttgtctgcttccatataaagagtttgtgtagtttctctacgaggattgacaatcttgtctttttgatacaaaactttgtaaatcataaatgattctccttattaatgtataaacgttcaatgtagagtaaaaattactcaatagctataaaaattttatcataattataaagttaagtatataattatgtttcttttgatttttaccgattaaatttggtcaatgttattgacgtaaaataacatcagttgtacgataatcatgtagtaaatgattaataaattcatttgctcgttataagaagtctcttcaatcttcttaattcccaatgtatgagtcactggcctagttaaccagtgactttttttatacaaaaaagcctgcatctgcaggcttttgttttggttaaataacaattaagaaattacgactgtatcttctttaagtgcgaatggatcctgcttattaatgcggtcatagaacaagtgaccatttaagtgatcaatttcatgagaagaaacaattgctgggtaatcctttaagcgaatggttttttcttcaccgtcaacggtgtagtaatgaatggttaatttatcagggcggggaacgtaaccattaataacttcatcaacactaaggcaaccttcaccttcgctaagacaagcttgacgaacagattcagagacaatctctgggttaacataaacttctttaaagataattttgccttgatcatcaggaactaaaagtgcagccatttgtacaccttcacctacttgaggtgcggctaggccaacgcctgctcttaattggtgcttttcagcaatcttaggatcttgtgaatcaattaagtattgcatcatatcatcagctaattttttatagtgatcactaaatggaaatgttaaaggcttggcaacttgacgtaagacgggatcaccgtcacgtacgatatctttcattaagatcaaaataattactcctttttaaaaattattatctacattatatttttaccatagtttaatagtttttgcttgtttttgcataaaaaaatccagggttaacttgattgttaagcgttgacccgtatgcagttaggtggtaaaattcactaacgtaactatacagatttaagaaaagcacttcgataaggcgctaatgcgttaccgaaactgtgacagagtcacagtttttttattgaagagtggggaggaatacttttgtcagaaaaaagaagagacgatctaagaaacattgcgatcattgcccacgttgaccacggtaagactaccttggttaaccaattattgaagcaatctgatactttgccagaacacatgaatctggaagatcgtgctatggactcaaatgccattgaacgtgaacgcggtattactattttgtctaagaacactgctgttaagtataaggatactactatcaacatcttggatacaccaggtcacgctgactttggtggggaagtagaacgtgttatgcacatggttgacggtgcattgcttttggttgatgcctatgaaggtccaatgccacagactcgtttcgttttaaagaaagctttggaagctggcgtaaaacctatcgttgttttaaacaagattgaccgtccaggcgctcgtcctaagaaggttttggatgatgtacttgaacttttcatcgaattaggtgccaacgatgaacagcttgacttcccagttgtttatgcatcagctttgaatggtacttcatcatatgatccagatccaagtactcaaaaggaaactatggatccaatctttgataccattattaagaatattcctgctccagtagacaactctgatgagccattacaattccaaatcaccatgcttgattgggatgactatgttggtcgtatcggtgttggtagaatttaccgtggtaaggttaaagttagtgacaacatcactgttatgaagcgtgatggttcaactcaaaacttccgtgttactaagttatttggttactttggcttgaaacgtaacgaaattaaggaagctaaggctggagatattattgccattagtggtattaatgatatctacgtgggtgaaactattgcatcagctgaacatccagaagcattgccacttcttaagattgatccaccaactcttcaaatggactttgttgccaacgattcaccatttgcaggtcgtgaaggtgatcaagtaactcctaagaagcttgaagatcgtttgattcgtcaaactcgtaccgatgtttctttgaaggttgaaccaactgatcaattgaacgcttggactgtttcaggtcgtggtgaacttcacctttcaattttggttgaagaacttcgtcgtgaaggcttcgaattacaactttcacgtcctaaggttatttaccgtgaaattgatggtactatgtgcgaaccatttgaatcagtacaaatcgatactccagatgaatatgttggttctgttattgactcactttcacaaagaaaaggtgagatgaagaatatggaatcaactggtaatggtcaaactcgtcttgaatttttagttccatcacgtggtttgattggttacaataatgaattcatgtcacaaactggtggatatggtatcatgaaccacacctttgaagcatataagccagtagtaaagaactggaacccaggtcgtcgtaatggtgcattggtatccattaaccaaggtcaatcaactacttactcacttcaatcagtagaacaacgtggtgagttattcatcggtgctggtgttgaagtttacgaaggtatgattgttggacaatcatcacgtgaacgtgatattgctgttaacgtaactaagggtaagaacttaactaacactcgtgctgccggtaaggaccacgctgctgctattaagactcctagaacgttgactcttgaagaagctatcgaattcttaaatgatgatgaatattgtgaagtaactcccgaatctattcgtttacgtaagaagattttgaacacttcagaacgtcaaaaggctgataagaagcgtaaccgtgctaactaagatagtttaataaattttaaaaggtcgtcacttgatagaagtgatgatctttttgttttataatgaaaaaagtattatttagataaaggggcaacgcttgtgcgtcgaaaattacgttatcttaattaccagatttttattccctatcttattttagtagtggttgggataattttggtatattcagctagttcagatattttattagttaatggatttaagccaaatgtctatgggatacggcaagcaatctatgctatagtagctttctttttgtttgggattccgttttttgcattaagaatcaaagtatttaaaaatccaaagtttgtagggggatttttattaatttgtatacttatgttaggatggctagtatttctacgttttgctcatggcagtagtgcggcagttaatggtgctgtaggttggattaacttgggctttatcaatttgcagccactagaagttactaaattggctctggtcatttatttgtcatatgtactagacagaagagatggaaaattagtcaagggtaagatcaaacataatttgtcacacccagcaattttggcggcttttttaatgtgtttggttattgttgaacctgattttggtgggacagcaattttatttatgatcactttagtaatgttttcagtatcaggggttccaactaaattagctttaacttggttagctgggattgtgatcttagtgacagctgtattttttattgtagttgcctggaatcctggatttttacaaagaagttatcaattccaacgactaatgtcgttcttgcatccctttgaattagagcaaaaaggtggggcccagctagttaactcctattatgcaatccacaatgggggattatttggcgtaggactaggtaatagtatgcaaaagcgaggttacttaccagagccgtataccgactttattttatccattacagcagaagaagtaggtgtgattctgacaattttattggttggattactcttttatttgatgtggcagattatggaagttggggttcacgcggtttctcaattcgacgcattaatttgctttggcgtgacgactattatttttacagaagcattctttaatatcggtgcagtactaggattgttgccgattacgggggttacgctgccatttatttcatatggtggttcatcaatgattgtcttgactgctgcgattggtttagtactgaacgtttcagcaaatgaaaaaatgttacaggaaaaggatgaaacagttgcatgagtatcaataaagaaattgaaagtacccacttaattaaaagggtagcattgattatttatttaaaatcagttagtgatcaatataagttgcgccattttggtgacattgtttatttttctaaaaaaatgaaatattgtgttctttatgttaatcgcaacgaatgcaatgaaatcaaaggacaaattgctcatttggattttgttaatcatgtcgaaatttcagctgaagaagaagtaaatttggatagccaacatattgaaaatcaattagctaagatggcccaaaaagcagaaaagaaattgcaacttgaacaagaaaaaagtgagaatcaactaaaatgagaattatttcagggaaatatgctaaaagaaatttatttactttgaaaagtaatcggacaagaccaaccagtgataaggtgaaagaatccctttttaattcattgggacaattttttcagggtggtaatgttttagacttatatgctggtagtggtgccttaggaattgaagctgtttcaaggggctgtgaccatgcgagtctggttgatattaatcatgctgcttgtacaattattaagaaaaatgttgctttaactaaggaagagcagcgttttaatgtttataatatgcgcagctctgcagcattaaaattattttctgagaatgatgaaaagtttgatctagtttttcttgatccgccctatgccaaagaaaaaatcgctaaggacatgttgcagatggtaaagtcgaacctacttaatgatcatgcaattgtggtagcagaaactgatgatcatacagaactgggtgaaattactggtttttcattgatcaaagaacaccatttaggaaaaacaattgtgaggatttatcgaaaggactaataatgacaatcgctttatttccagggagttttgatccgattactaatgggcatgtggagaccgctaaaaaggctgctgaaatttttgataaagtatatgtagttgcgatgaccaatacagctaagaaatacttgtttacgcctgaagaacgtgctgatctaatcagggatgcactaagggaaatacctaatattgaagtgctagaaagaccggaagaagtaactgtaaatttagcacatgaattgcatgctaaagttatggtgcgcggtgtacgcaacagtgctgatttccgctatgaacaggagattgctgggattaataaaaaattggctccagatgtgaatacagttttgctttttacgagtccagaaaattcttttgtagcttcaagcatgattaaggaattagctcgttttgatgaagatgttagtctgtttttacctaaaaaagcagcgattgcattgagagagaagctaaaacatgaataataagaaaaacaatcaatcgaaaaagcacttgcgtaattggctcttggcactaattgcgcttgttttattagtggtacttgctgtttggccgaccgattattatattgaatatcctggtgaggcaatgcccgtgggccagtttattaagtcatcaaataaacgtccgaataatttttatttggtgacagttagcataactagtcggccggctccggttttgcaatatctatggagttttactcgtccgtatgatgagcgtgtatcaagcaaggagctgctaggaggtcaaactagtgctcaatataatgagttgcaaaactggtatatggaaacaagtcagcagaatgcaatttattatgcagctaaaaaagcaggtaaccagcatagcttaaaatatctaggcgtttatgtaatggaagtccagaaaaattctagttttaaaaataagctccaaattggtgataccgttttaggcgcaaacgggcatcgtttcagctcaactgaagagatgatggattatttgcgtaaacaaaagattggtgcacgagtaacaatctcagttttgcgtggtaagcaagagaaacactttactggcaaaattgttaaagtaaagggtactaataagccaggaattgggattcaattagttgagcatgtagttgtgaaaactaagcctaagttaaaaattaatgctggcgaaatcggtggcccctcagccggattgatgtttacacttgaaagctatgaggtctttaccaagcagaacttaagtaagggacataagattgcgggaacaggtacgatttcacctaccggaaaagtaggaatcattggtggtgttgataaaaaagtggtagctgctagcagagaaggtgcagaggtcttctttgcgccgactgattcaaccagtgtgaagaaaagtgaaactaattatgcggttgctaagagaaccgcaaagaaaattcacaccaaaatgaaaattgtccctgtgagcacttttgatgatgcattaaactatctaaagacacactactaaaaaaattcaaaaaatttgaagtctagaaaaaattctgggctttttttgcgtaataaatagtagaggtgatttttatgaattttgaaaaagtaaaagaatttgtgcttgagaaaaaagcatatctcattggtgcaataattcttgtagttggattttatggattgaagaaaggggatcatcaagaaaatgctgctgcagtgcaggatcaagttatgcagtctagcactagtagttcaggtgcaaccactaatactaatgcagtgactagcagtagttcaacaaccgtttctaagactgtaacttgtgatatttccggtgcggtgaagcatcagggagtatatacattgaaaaatggtgctcgtctgcaggagttaattgaggcggctggaggtactactgctagagcacaattaaaagctattaaccgcgctactttgcttaaggatcaagataaaattcatattccttacaagggtgaaaaggttgaaaatgtggcaactgcaggatcagctgataatagtcaaaatagtgggagtactagtagcagtagcccaagtaatcaaggggatggcactaagatcaacttaaatactgctaatgtaacggaactacaaaagttaactggaattggtcaaaaaaaggcagaacagattattgcttatcgtgaacaaaatggttcttttaaaaagatagaagatttaatgcaggtatcaggaataggagaaaaaacttttgcgagccttaaagatcaattggctgtttaaaaatgaagttggcttttacttaataaccgctttgttgctaattacaatctcttttttggctttttcttgtacaacaatggtgcaaaaaatagtagctttattttttctgggttactttttgctactgttagtacaaaaatatcgagttagtttaaaaatagttagtctaatagttggagcatttctattactgatttttttaagtaaaccaaaaaccaattttgttttaacccagcagagccaattaagaatttaccctgatcaggtaagaattaaagacgactacttaacaggtgtgggtaatttcgctcaaggtaaaattttaattggtggcaaggtaacagatgttcaaaaagaactgcttaagcatgggaaccctattttagtgacagaaattaatggggaatgcaattcaattgagccagcaactaatattggtgagtttaattttcagaattattatcaggcaaaacagatttaccaaaaattgaaatacagtagttgtcaaatgaagctattatcgattactgattttggggatcaattgcatcaattacgttttgaattgcagaactattttgccaagatgccacagttattaggctttttcgctagtgaattaatcttgggtgaaaataatgctcaagaaaatcaagaaatactaaataattatcgagatttgggtgttattcacttgttaagcatttcaggcttacatgttggaatctatgtcttgttaattagtgtattttgttttaacttgaaactgacggatgaagaaacttttgtctgctgtacattggttttattgctaggtatttttctaagcaatggtcaagccggctttgtaagagctagtttaacctactttttaggcaaaatttgtaagtttaagaaatatcatgttgcgtcgatagatctgctgggattgacctgcattttacatcttttagtagtaccgcgtttatttctggcaactggagccttattgagctatattttggcattgggtttacagttaactgataagtttggcagttttaaacaagcaattttgttaaatattttattaacgccattactattgcttttcttttatcaggtcaattttttaactgtaatttttaatatgttagtagtgccatatttcaattggatagttttaccaattgcttttttcaatattgtgacgtttggtctgactaaagattttgctccggtattagaaaaagtgcttgaattaggtgagaaaatcattgggcaattatctgctactaagttgggactactaacttttgggcaaattaattggtggcagtgtctgttgctattaatagtaacgattattttaattgtttctttaagagaaaaagttaactggcgctttaatagtaagaaaattatggtgggcttgttgagcttgtatgtaattttcttcagcatgattcattttcctttgcgagggcaagtaaccttcattgatgtgggccaaggagatagtattctagtgactacgccatttcctcgcaaggtatatttaattgatactggtgggaaactaaactttagtggcaaaaagcagacacctcagattgatcgaattactattccatttttgaaaagtcagggaattaatacaattgatggagtctttgtttcgcatcaagatgccgatcacgttggtgatttaggaccattactagagcaggttaatgttaagaaattatttatggccgaaggactaattaagaatccatcttttcaaaagagattagatggtcgtgtaaaagataccaaattattggagttacttgcaggaatgcgggtgaaagaaccgcagattacatttaatgtggtttatccatatcaagcaggagaaggaaagaatgaagattccctgagtttgctttttagagtagcgaataagaattggttgtttacaggagatttaggtcaagatggtgaaaaggaaattatgcagaggatgaaacttcaggtagattattttaaattgggtcatcatggcagtaaaacatcatccaatccagactttttacgtgcaatccatcctaagcaagtttttatttctgctggtcgaaaaaataggttcgggcacccccatcaagagacgctaacgacactaactcaacagcaaataccatgggtttcaacgcaagactgtggtatgattagctggtattatggcggactgcaaagtcctagatttagttactttttaaagcgggataaaaaatgaccttactttctttgtttaaaaatacaaataacaataatccacataccttaatttggggtgcagatgactttctcaatgattacttggtgagatcatatgccaaggaagatcgctttaaagatttggagcacgtgactgtcgattgcgaaagcgatggcttagatgaattgattgcgagcttaactgaatccagtttatttagtgaacagaaatttattgtagtcaaaaatcctttctttttaacagctaaggtatctaaaaaattacagaaacaaattgatgacttacaaaagatttttgaaaacttagctgatttagaagatgtagtagtaattgttgcttcttatgaaaaaattgataggcgtaaaaaactgactaaaactgttctaaagcaattcaatgtggttgagccacaaattaggccctatgaagttgcttcaacgactaaagccttgatcaaagatgagggatatataatcacacagtcagctttacagctgctaattgagcggagtgatcaggtaattgacactattttaagcaattatcaaaagctaaaaatggtagctaccgataacaaaattactgaaaaatcagtaatgcaaaatgtagatttgtccctagcacaaaatattttcgctattttggagtcggctttagataagaattaccgtgaagcagttgagcgcttagataatcaattacgtgaagggactaatccaattcaattattagcggtctttgaaaatcaattagaattgattttggtcgttaagatcttagcacaaagaggtcgtagcgaaccacaaattgtaaaagaattaggcgttcatccctatagggttaagttagccctacgtaatcggttgaagatagacaagctagaaaatttattaagggatgcaatcgacttagaatttaaatataaaaatggaacttaccgagaagataattttttgaaattatttatcttaaatgtctaagagtatacaaaaagaggagatcactgcagatctcctctttttattattagtaataagtaagatttacttgtttgctaacttgtttaaacgactcttgtcacgagcagccttgttcttgtggattaagccttttgaagcagccttatccaaagcacgttcagcttctaaatgcaacttggagacgtcttccttactatcactttcaacagcgttcttaaacttcttgatagcagttcttaacttgcttaattcagaagcgcggcgttcgttagtagcattttgagccttaacacgtttgatagctgatttgatttgtggcatgaaattcacctccaatgatttagaaatttacttcatccattatacttaagaaatatcacggatgcaaggtaatttctgcttgcttttttaaaaaataatgtgtatgattatgactgttgtgaaccgctaacgctgtttatttgttcacgccgacgataaacgttgttaacggcaattatttaatgaaaggtgaatttaactatggcaatttcaaagactgaaaaagaaaagattatgaaggaatacgcaactcacgaaggtgacactggttctgttgaagttcaagttgctcttttgactgctgatatcaacaacttgactgatcacatgaagagtcacaagcatgaccaccactcatacgttggtttgcttaagaagatcggtcaccgtcgtaacttgcttcgttaccttgaaaacaacgacattaaccgttaccgtgaattgatcaagaagttaggtcttcgtcgttaattttcacataatattgaataatgaagctagccgaaaaggctggctttttttgtctctgtcataattttattctttatgctaaaattgaaacagattatttttacgttgagatcgatagatccataagaattaaaaattagatagaaaaggaaatataatggctgatcaaatcaaaattatgatcttgagcggtgtgcgtgaacaaggtaaagacatgtttgccgttcaagttaatgatgaaatttttgttcttgatgccggattaaagtaccctgatagttctttatttggtatcgatgtagtaattcctgaccttgatttctttgaacaatacggagatcgagtagcaggtatctttttaacacatgggcatgctgattcaattggtgcattgccatacattttgcgtaaatacgatattccagtatttggttcacaattgagtatcgaacttgctaaaattgaagtacaacgcgaaaacaaacgccgtaagaatagtttgttccacgtaatcgatgcagatactgaaattgattttaagaatgcaagtatttcattcttccatacgacacactcaattcctgattcacttggaatagatgtacatacaccagcaggtgaaattgtttatactggtgactttaaatttgatccaacagctgcgttaaattatcggactgatatggatcgcttagctgaaattgaacaaaagggcgttttagcgcttttaagtgattcatctaatgcagaagcatctttccctaatgcatctgaacaagatattggtaaatttgtgactaatgtcttcagaaatgctaaaggcagaattatcgtagctgctaaagcctctaacttgaatcgtgttcaagaagttttaaatgctgcagcagcaacagggaaacgcgtcttattaactggccgcgatctagctaagattgttagaacttcaatgaaattaggctatttagatgtgcctgaaggcttgttgatgcgagttaaggatctgaagactgtgccagatgagcagacagttatattagagactgggcgtatgggtgaaccacttaactcattacaaaaaatggctaagaagcgtcatagtatgattacgattcataagggcgatttggtctttattgcaactactccgtcacatgcggttgaaacgatggtagctgaaaccagtgatttggtatataaggctggcggtacggttatccagttaggcagaaatatacatactagtgggcatgcaactggtcgtgatctgcaacttttgattacaaccttgaagccaaaattcttaattccagtaattggtgaatatcgtttacttgaagtagtacgtgatttggctattaaagctggaatgaatcctaaagatatttatattaccaagaatggtgactgtcttgaatatgactttaagcagaagcgtttcttcttaactgacccagtaccaggtgaagataccatgatcgacggttctggtgttggtgatgttggtaatattgtgctacgtgatcgtgaggtcctatcagatgacggaatctttattgcggttgttacaattgaccgtaagaagaaaaagattattgcagagccaaaagtcactagtcgtggtttcgtctatatcaaggctaatcgccagttgatgagtgattcaattgatgtaattaaaaaagcaattcaggccaattttgaacacaaaaagtttgattggactgaattgaagcaagatatccgcggtgatttggagaagtttttatacaagaaaactaaccgtcgtccagtgatcttgcccgtggtcatggaagtaaatcaaaaccgtcatcgtgctatgcagaaacgcaatgaaaaagcacaaaatgacaataagaaccatgccaaagacgaaaataaaaaaataaataagaaaaaagaaagtaataagaaagactaaaaatgacatcagtaagccaacaaaatttattgaaacttgctgaagaagatgagcgtaagggagatctcgaagcagctattcaaaatctagaagaagcattacgtgaagagcattcattggacgttattttgaaactctgcaaactctattgcgctaataaacaagaagatcaggcatatgctttaattaaagaggagcctgatcttttttctgatcagcgagtatttaaaagttactgtcaaattctagctaaaaataatttttttattgaagctctacaactaaaaaatcttgttggggtggacttatcagaaaaggtaaaaccagcttctgaagaaaaacagcggcagattatgcaaaactttaaacaacgagaacaggttactcagtcggattatgaaagtttacataagttaaacctgcctaattttaaagcttttgcacgaagcgtcttattagatccaacgccagattttgctgttaggttgtcactttgtgaagacttagttcgcttgggacttgaagaaaagtttgaaatttgggtaataggccagatggagagctttattccggcgaatacactgcttctagaaaaagaacctaagtaccgtgaaattatttctagcattggaagcaaatttcacaatagtccaagtcagttgccattaatgctgggagaagtgaatttggtattaggcagtctttaccctaaaattaaccaatatattgatgagcctgacagttttgctagtgatttagtctcatttttacaaagaaaagatggccgtagtcatcaaaaattactagaaaaaatatataaatacttaccgcaataaaaaataagtaaaaaaggtttacattttcaaactatttagtataattagcaaaggatattttcgttaggcaatttcgcttaagcttttttactaggcatttgccgaagaaagtagtacaatattcaacagagaattatccgttaacttatctcaacggacttcttgcaaatttacaggagggtcattttaatggcagaaaaagaacattacgttagaactaagccacacgtaaacattggtactatcggtcacgttgaccacggtaagaccactttaactgcggctattactactgttttggctgacaagggtttggctaaggctgaagattactcacaaatcgatgctgcaccagaagaaaaggaacgtggtattactattaataccgcccacgtagaatacgaaactgaaaatcgtcactacgctcacatggacgctccaggccacgccgactacatcaagaacatgattaccggtgctgcacaaatggatggtgctatcttagttgttgctgcaactgatggtcctatgccacaaactcgtgaacacattttgcttgctcgtcaagttggtgttaactacatcgttgttttcttaaacaagtgtgatttagttgacgacccagaattgatcgacttagttgaaatggaagttcgtgacttgttgactgaatacgattaccctggtgacgatattccagttgttcgtggttcagctttgaaggctttacaaggcgacaaggaagctcaagaacaaattcttaagttgatggacatcgttgacgaatacatcccaactccagaacgtcaaactgacaagccattcttaatgccagttgaagacgtatttactatcactggtcgtggtactgttgcttcaggtcgtattgaccgtggtactgttaaggtcggtgacgaagttgaaatcgttggtttggtagacaaggttcttaagtcagttgttactggtttggaaatgttccacaagactcttgacttaggtgaagccggcgataacgttggtgtattgcttcgtggtattgaccgtgaccaagttgttcgtggtcaagtattggctgctccaggctcaattcaaacccacaaggaattcaagggtcaagtttatatcttgaagaaggaagaaggcggccgtcacaccccattcttctcagactaccgtccacaattctacttccacaccactgatattactggtgaaattgaattgccagaaggtactgaaatggttatgcctggtgataacactgaatttactgttaagttaatcaagccagctgccatcgaaaagggtactaagttcaccatccgtgaaggtggtcgtaccgttggtgccggtcaggttactgaaatccttgactaatttctaacgatatagttaaaaaaagatgcacttcttcacaggagcgcatcttttttcttttaaatttgttttttgcggccttttaaggtaagataacttagtatgcaagatgcaaactcaaatttgacattggaggtatttaattaatgtctgttaaatgggaaaagaccggtaagacaaccggtgatcttacttttgatatttcacaagatgaaattaaattaggtttagaccaagcttttagaagagtaaagaaaaacttgcgtgttcctggctttagaaagggtcacgtatcacgtgtgatctttgatcaatattacggtgaagaagcattatatgaagatgccttaaatattgtattaccaaatgcatattctgctgctgttaaagaagcaggtattaaagcagttggccaaccacaaattgttcctgtatcaatggataaggacaaggattggactatgaaggctactgttactgtagaaccagaagttaagttaggtgactacaagggtatcgaagttcttaagcaaaacactcgtgtttaccaaaaggacattgatgctgaacttgacaagcgccgtgaacaaaatgcagaacttgttcttaagaagggtaaggctgaaaagggcgatactgttactatcgattacaagggtactatcgacgacaagccattcgaaggcggctcagctgaaaactactcacttgaattaggttcaggtgcatttattcctggctttgaagatcaacttgaaggccatgaagccggcgatgatgttgatgtagttgtaactttccctgaagattacggtgcaaaggatttagctggtaaagaagcacactttgcaactaagattcacgaagttaagtcaaagcaacttcctaagttagacgatgaatttgctaaggacgttgatgactctgtagacacccttgatgacttaaaggaaaagatcaagaaggacttgaaggaacaaaaggaacaacaagcaaacgacgctattcaagaagctgcaattgaaggtgctgtaagcaacgctactatcgatgaaattcctgatgctatgattcaagaagatgttgatactcaattgaaccaatacttgggtaatatgcaacgtcaaggtattgacccacaaacttactacaagttgactaataccaacgaacaacaattgcgttcacaatttgaaaagaatgcagctgaaagagttaaaactaacttagttcttgaagctattgttgctgctgaagaccttaaggcaactaaggaagaaattgataaagaaatcaaggatcttgcttcagaatacaacatggatgaaaagatggtacgtaacaccttatcagatgacatgttaggccacgacattactgtacgtaaggctatggatcttattactgataatgctaagcaagttgctaagtcaaagcttgaaaacaaagaagacgatgacaagaaggaaagcaagtaatagtaatatttgctaatttctcaaaaagagcggctataggccgctttttttgctgttcgagcttaatatttatcaatattagttaatttatgataatctgatttttggtagatataggaggaaaaataatggcaaatcagtttacagatcaagaagagattaaatgcgctttttgtggcaaaactcaagaccaagttaagaaaatgattgccggtaacggtgtatatatttgtaatgaatgtgttgacttggctaaaaaaattattgacgatgaattacgagcagattcacttaaagcagctcgtgaattacctaagcctgttgaaataaaaaaggaacttgatcaatatgttattggtcaagaccgtgctaaaaaagtcttatcagttgctgtatataatcactataagagaattagccaaatggatgttgattcttcaactgaattacaaaaatcaaatattgcaatgatcggaccaactggatcaggtaagacatatcttgctcagactttggctcgtattttaaatgtcccatttgcaattgccgatgcaactaccttgactgaagcagggtatgttggtgaagacgttgaaaatattttgcttaagttactacaaaatgctgattatgatttggaacgtgcacagcgtggcattatttatattgatgaaattgataaaatttctaaaaaatctgagaatgtctcaattacgcgtgatgtttcaggtgaaggtgtacagcaatcattattaaagatcttggaaggtacaattgcctctgttccacctcaaggtgggcgtaaacaccctcaacaagaaatgattaagatggacacgactaacattctatttattgttggtggggcattcgacggaattgaacaaatcgttaaaaatcgtttaggtaaaaagaccattggctttggtgctgaaaatgaggcagataaaattaatgcagatgattggacacgccatttgactacagctgacttagttaaatttggaatgattcctgaattcattggtagaattccaattattactacgcttgataaattgagtagtaaggatttggtcagagtgctaactgaaccaaagaatgctttagttaagcagtataagaagttgttatcacttgatgatgttaatttgaagtttactgatggtgctctgaaggcaattgctgacttagcaatccaaagaaatatgggtgcacgtggacttagaacaattatcgaaaattcaattatggatattatgtatgaaactcctagtgaagaggatattgagaccgttgaagtaactaaggacgtaattactaagcacgctaagccaaaggtaatccgcaaaaatactgataataaagaacaggtaagtgtcaatgatcattgaaagcagtagttatgcagttagtgctgttagagaagatcaatatcctaaagataacttgcctgagatcgcattagcaggccgctcaaacgtgggaaagtccagcttgataaataccctattaaagcgtaaaaacttagctaggacctcgtcacagcctggaaagacacaaactttgaatttctacaaagtcaatgaaaaattttatttggttgatgtaccaggttatggctatgccaaagtttcacagaagaagcggcaagaatttggcgaaatgattcaagattatttagaaactagacccaacctaaagggactaattatcttagtagatagtcgtcatgaaccaaccaaagatgatattgctatgtatgattatgctcaatatctaaatatcccaattttggtagtttgtaccaagatggataaaataaaaaagagtcaaactaataaggtgatgtcaggcttaaagaaaaagttgaatctcaactatgatcatgtcaccgttttgacttttagttcggtcactaaattacatgtaactgaattaagtaattggattgaaaaaagaattaatgaataaaaatgaagggctactagtgaataactagtagttttttcttatgagcctaaaattagaataaatttattcaagataaacgatgctaaaatggaaagtgtaaatagaaagtagaggctttatcttggatgatgaaaattcacaaactaaaaaatcattgacgactatgagccttgtgttgatgattatcacaacggtttatggttttggcaatgtttctgtttcttatgagcaaatgacatatgctgggatcatttggtttattttggctggcgtctgtttctttttcccagctggcttaatgatggcagaatatgggtctgcttttcatgatgctcaaggtggtatttattcatggttagctggctcagttggacaaaaataggcctttattgggacttttgtatggctggctaactgggtgctgtggctggttgcaagcgcctcaaggctttggatttcaatctctgcccttatttttggcaaagatacaactcaagaatggaatattttgggcttgcatggtactcaattgataggtgtactagcaattttattcatgattgtatcaacgtacctgtcttccagagggataactggaattaaaattatgtcatcaatcggtggttggttcatgattgtaatgaatgcagtctttattctagctagtttaacggtcttgattatgaatcatgggcaattggctcagccgattactgggtggcaaagttttattatttcgcctaataaaagttttcaaacgccaattacgattatttctttcgtagtttatgcagtctttgcatatggtgggatggaaaccgtcggtggtgtgattgacagtatgaaacacccagaaaaagatttccctaaaggcttaattattgggtcattgttcactattatttcttatgttttgatgatttttatgaccggcttttcagttaattatcaaaaagatattttagcagccaatgccaatactggaaatattacgtataccgtatatggcacacttggcaaagcctttggaaccgcacttcatttggatcctaacacgagtttattgattggtaaattctttactagagcaattgctttatctggtttgatgggaatgacaggtgctctctttgttttgctttattcaccaattaaatccttcatcatgggatctgatccacgtttatggcctaaggcagcgactaaattaaataaacacggtattcctgctaatgcgatgtgggctcaaactgtcttcgtttgcctattaattgcggtggtctcattcggtggtagcgcagcgactagcttttatcaaattctgacggatatgggtaacgtagccgctactgcaccttatattttcttgatcggtgcatttccattctttcttaaaaaagattatccgcgcaagtttagagtgtttactaactataaatggacggttgcgttagtagtctttgttgagctgattgtttgcaccggaattatatttacggttttgcaaccagttttggagcatagatatgcaactgctttttggacaagctttggtccaattttctttggtttagtagcttatcgcgtttccaagaaaaagcatggcttgaaagacttagattaataattaaaaagtaaaaatggcttgcgtgttgcaagccatttttttacgctaaagttgtaatgtcattgaactttggcagattagcaataaatttttcataagcactttgttcagcagtcttttggatctggacattggaaaaatcacctttccttaagtcagcttcagaaagcttaattcgatgagtaaaagtagcgttaccaataagctcgatccaataactatttttttcataatgcacgatagttttaaccataccgccaggattataaactgatattggtgtatttaagttgcctatttcggggtgggttaaagtaagagcaagagaagtcgcggacattccagtaccacaggcattggtaaaaccaacgccccgttcgtaagtgcggacaaaaagtttatttttatctaaaatttgcgcgaaattaacattgacgccatctgtaaagtagggattattgctatttaattttttaccaacaatgcctaagatcgggccggtaatttctgcttgattaacaaaagaaattaaatgtgggttaggtacggcaattgaagtaaaacgtaatccaggataaatttctggcaaccaagcatcaataatccgttcttgtcctaaattatcaaaagggagtgcctctttattaaagcgtacaggagagatctcaactgcaaatgctggcacgttagaagcaaaatctttttctcttctaacacgtaagctggcattcattgtgtcaactaggaaattatcttttcccgttttttcacttaggtaacgagcaacggtgcgtagaccgttgccacacattgatgcttcacttccatcagcattgattacacgcatctggccaagtgagttagaatgcacgggatgattaactactaaaacgccatctgctccgtgaagcagtccagtttgtggattggtaatcttttgcgtaaaattttttagctcggcgtcacttaattcgtgttcgaattgtgtttgatcaagaataaagaaatgattttgcgaaccgtgaactttgaataaattaatcataatgccccctaattaaaaaacttttgataaataatttttactgcttcatcagccttttcttttttagtaccgatcatgattgaaatttgagaagctccctgattgatcatttgtggtgaaatatcatgatcgcctaaagaatcgataatttgacggctgatggtatgtttttgtcgcattccttcgccgacaaccataataattgcataatcttcaatccattcgagttgatctggattaattgtagcttgaatttcattacaaatttgatcaattaactgatcgtttagaaaatcattgttaaaaataatggtaatatcgtcaatcccagatggcatatgctcatatggaatattatgttggtataaaatttgtaatatacgtaaggtgaaaccagcttctttattgagcaaatatttatgcaaatataatgcggaaaaatgtttttggctggttacgccggttattgcattatctgggacaaaatccttttctgggacaatcatagtgccaggattgctaggatcatgagtatttttcacattgataggaatctgtccttgaatagcaggaatcaatgcttcatcgtgaaaaacagaaaagccagcatatgacaactctcgcatttcgcgataagtcattttcttgatggattggggatgctcaataatatgaggattagcggcaaaaatcccattgacatctgtaaaattttcatagagatcagcatgaaagccgcgagctagaatagccccggtaatgtctgacccgccacgggaaaaagtggcgatattaccagacggagtcatgccaaaaaagccaggaaatacgatacgttcatcagccttaattttaatttggtcaagatttaagtagctctctggattgacaatggcatcattgggctcgccagtcacgattaaaccggcttcagccggatcaagaaaacgactattaattccttgatggcgtaaaattaaagtaattaaacgagcattaagccgttcaccatgtgccttaaatgcagctaaaagatatttttcgttaggataaccctgattgggcaactctaataaaatttgtttaataatacttaattccgtatcagctaagccaaaataatgaccaatttcttgatagcgactaaaaattttattcacgatttcaacacaattcttgtgctttaaggctaaatctgcgtacttgattaacagatcagtaactttgatatctgttgtattccttttgcctggggcagagacaaccattacttgtcgttgaggatcgctgagaataatttgaattgcttgtgcaacactttcaccggtagctaaagaagagccaccaaactttacgattttcatttcaaaactccttttgttttcagaaatcattaatttaaataaaaaagtcagactaaatttaattgaattctaacattattttttaatcttgcaagtgatgactgtaatttatcactctaaatgccgcattgttacaaataaaattaaatttttataataaatttgttgactatgtttttataaaattgtaaactacagtcaatcgaagaggcgcagccgacataagtaacaattctgagttgggcaaaacgaagatgaattgtaaaaggggaggttgccgaagctgagtcatgctaaaggcttgagctggggcgtagttgaataaactgcggactgtcgcgaacaaaattcgcggagcgctatcgaccatagattaagtagaaattaatccattgtttgtttggcgcagacaatggattttttattagcgtttcgcctgaaaaagacaggagaacaaaatgaattcacaaattgcagtagatcagattaatgagcaaggccatttaacgattggtggagttgatatagtagaattagctcaaaagtatggtacgccattagtagtttatgatgtcgatcaaattcgtcgacaaattcgggcttttaagaaagtttttgaagaagaaaacatggcctatgctgttagttatgcaagtaaagctttcgcagcaatcgcaatgtatcaagttattgcagaagagggagcatacactgacgtagtttcagcaggtgagttatttactgcaataaaagccaattttccaatggagagagttagctttcatggtaataataaatcattaactgaattggaaatggctgtaaaaaatcatgttggcaaaattattattgataattttcatgagattcagttattggcgcaagttttaaaaaagtacgatgctacgattagtgtcatgttgcgtattgcaccagggatttcagcacatacccatgaatatgatcaaacaggtcagattgatagtaaatttggctttgatcttgaatcaggtcaagcagaaaaggcattaaaacaagttctagctaatcctaggatgaaaatgttggggattcatgctcacattggctcacagatttttgccttaaacggctttgaaatgggagcacaaaaattaatggtagtagcgcaagattggcgagaaaagtatggctatcttgcacaagttattaatgttggtggcggttttgggattaaatatacccaagaagatcatccattacgaccagaagaatttgttaagacgattgttaaggtgatcaaaactgaagctgaaaaaatgaattatcctttacctgaaatcgatattgaaccgggaagatcaattgttggtccagccggttacaacctttatacggtgggtagccgtaaggatattccaggttatcgttcttatattactgtcgatggcgggatgggagataatattcgccctgcactttatcaggctaagtatgaaacagttttagccaccgatccacaagcgcctttgactgaacatgttcgtattgctggtaagtattgcgagagtggcgatatattagcagaagatcaagctttgccacaagtcaaagctggagacttgttagcgatgttggatacaggtgcatatgggtattcaatggcttcaaattataatcgtaatcctcgaccagcagtggtatttgcagaaaatggtaaagcaaaattagtcattaagcgtgaaagtttagaagacttggttcatttagatcaatcatatttaaattagaaaagagaaaaaagatggcaaagttagatgcaaaaagtattattgattacattggtaatgcaccaaaaaagacaccggtaaaagtctttattaaaggagatttagcacaaattgattttccaaaggaaattgagaattttactgaagctcattctggcgcgatctttggtgactggaaagatattgaaccatttttaaaagaaaatcatcaaattacggcctaccatattgaaaatgatgcacgaaattcagcagttcctttattggacttcaaaaaagttaatgctcgaattgaaccaggagctattattcgtgatcaagtggtaatcggtaataatgcagtaattatgatgggtgccattattaatattggagcagaaatcggggctaataccatgattgatatgggcgtagttctcggtggccgtgccattgttggacaacattgtcatattggagctggtagcgtattggctggtgtaattgagcctgcttcagctaaaccggttcaaattgatgataatgtcatgattggggctaatgctgttgtgattgagggtgttcatgtaggtgaaggagccgttattgcagccggagcagtagttactcatgatgtgccagcacatacgatggtagcgggcgttcctgctaaaattattaaaaaagttgatgaaaaaactagtagtaagacggaactagaagataatctgagaaagttataaaatgtcagttttaagtgaaagtgagttaattcaaattagaaggcatttacatcaaatacctgaattagcactagcagaaaaagaaacacatgattatttaatcgaggtaattcaaaaatttaagcaagattatttggaagttgagataccgtcgacactgcctaccgcaattctagtattagttaaaggaagaaaaccacacagaacgataggatatcgtgctgatatcgatgctttaccagttactgaaaaaactggactggcattttcatcaaaacatgagggagtaatgcatgcatgtggacatgatattcatatgaccgtggcattaggtttgttaagctattttagtgaaaatcagccacaagataatttgctttttttctttcagccagccgaggaaagccaaagtggtgggatgcaagcttatgaaaaaagaatttttcatgatcaatttaaacctgacgagttctatggcttgcatgataaccccgctttgcctgctggtagcattgggtgtcggatgggtacactttttgctggtacaactgaagtcaatattgatattctaggtaaaagtggacacgcagcttttccgcaagatgcaaatgatacggtagttgcagcagcaagtttgatcatgcaggttcaaactattatttcacgaagcatagatccaattcaaagtggtgttattactctaggcaaaatcgaagctggtacgattagaaatgtaattgctggtcaagctagaattgagggcacgattcgtggcttaactcaaaatatgattttgacaatcgatcaacgtctcaaagaaatctgtcttggtattgagaaaagctttggtgtagaagtgaagttagacttgaatcaaggtggatattggccagtagaaaataacccacaattaaccaagaactttatttcatatatgaaaagccagccgacggttaactttattactactgaaccaaaaatgacgggtgaagattttggctttttgctgactaaattccctggaacaatgttttggctaggtgttggtaatcctgattcacaattgcatacggctacacttaatcctgatgagaaaagcattcagcgcggcgttgatgcaatcaaaggatttttgattaatagaatgaggcaataaaatggcaacattaattgatgcagatttgttaacggcgattgttacgccatttgatgagaatcaaaaaatagattttgccagtttagaaaagctggttaattatttaattgaccaaggttgcaatggctttgtagttggtggtacgaccggagaaacgccaactctgactcatgatgaaaagatagacttgtaccagcattttggtcaaattgttaatggacgtgttccggttattgcaggaacgggcagtaacgacactgcaaccactatcgccttcaccaatgaggtagcacagattaaaggaattgattatgccttagtagtagtgccaccgtacaataagcctgatcagcgtagcatgattgcacattttagtgctgttaatgctcagactaaaatgccaattatgatttataacattcccggtagaactggcgtaaaaatggaaaaagaaacggtagtccaattatcacgccttaaaaatattaagggaatcaaacaatgtgcatctttagaagaaatggaatacattattgatcataaagatcctaattttttggtatttagtggtgaagatacgcaagcgttacctgcaagattactaggagccaatggcgttatttccgtagctagccatttatattgcaaacaaatgcggcgaatgtttgatgatctttatgaaggaaattatcctgaagcgggcacgattcaacgctggttaacgccgaaaatgcaggctttgtttatgtatccttcaccagctcctgttaaggcagccttgaatgctcaaggatttatagtagggggatgtcgtttgccattagtcgctttaggtgatgaggaaaaagaaaagttggcccagcatttaggtttaaatgctaatgcattgatgcaaaagttgccacttaatttaggaaaggattggtaagacgagatgcctaaaaaagtactaatagctgggtttactggcgcaatggggcaaaaggctgttagtttagttaatcagctgcccaattttgaattggtggctggatttgctccaaaggcagtaaatgagcctgaaagatatcatttacctaaaacagcccaaatttttaaccaattaagtcaaattcctgaccatgctgcagatatttggattgattttactactcccgcagctgtctatgacaatgtttattttgctttaacgcatcaaattaaacctattgtgggaactactggcttgagtgatgatcaagaagcaactttgattgaactagccaaaaaggaaaaattaggtggcttaatcgcacctaattttggaatgtcggcagttttattaatgaagtttgctgaagaagctgctaagtatttccctgatgttgaaattattgaaatgcatcatgcagataaaaaagatgcaccttcaggcactgctttagctactgcaaaaatgatcgcgcaaaatcgtcctgaacatcaaactgcgcctgatgaaactgagactttagccaatgttcgcggtggagattatcaaggaattaaaatccattcagtacgcttacctggctatattgcacatgagcaagttttatttggtggacctggcgaagctttaaccattagacaggattcatttgatcgtgattcctttatgagtggggttaaagttgctttagaaaaagtagatcaattaactgaactagttattggcttagagaatattttataagaggaaaaattatgccagaattagcaaatgacttagctttaagtaagaagattcaatctgttaaggcttcggggattaggatttttgataataaagtttcaaccattcctggaattatcaagctgactttgggtgagcctgatatgaatacacctgagcatgttaaaacagctgcaattgaaagtattcgaaataatgattcacactatgcgccacaaaagggaaaattggaacttaggcaagcaattagcaattatttgaaaaaagcaagtggagtagtttacgatccagaaactgaaattgtggttacagttggcgcaactgaagcaattaatgcgacactattttcaattaccaatcggggtgataaggttgctattcctacaccggtattttcactatattggccagttgcaactttagcagatgcagattatgtattaatgaacacgtcagaagataactttaaattaacgccagaaagattagaaagtacacttaaggaagaatctaatatcaaggcggttatcttaaactacccagttaatccgacaggagttgaatacaccgaaagcgaaattagggcattagctgaagtgataaaagcacacaatctgtacgtaattactgatgaaatttacagtactttaacttatggcgttaagcatttttcaattgcaagtgtgattcctgaacgggcaatttatatttctggattatctaagtcacatgcaatgacaggataccgactgggttatgtagctggtccggcaaaaattatggaacaaattggtaaagtccatggtttaatggttacgactacaactgactcttctcaagctgcagcgactgaagctttggagcatggattggatgatccagaaaaataccgcaaaatatatcaaagaaggcgcgattttgtgttggatgaattagctaagatggggatgcaagcagttaaaccacagggagcattttatattttcgctaagattccagctaaatatggtaaaaatgatatgcaatttgcactggatttagcatttgaagcaaaagtcggtattactccaggtagtgcttttggtcctggtggagaagggtacgttagaatgtcatatgcttccagtgatgaaaatctacatgaagcgatggaaagaatgaagaattttttgcgaggaaaaaaataatggtgaaagaatataatgttgcaattctaggtgctactggtgccgtgggaagaagaatgatcgaacaattggaacaatcaacgattccagttaaaagcttaaagctactcgcatcctcacgttcagcaggtacagttttaaaatttaaggatcaagatttgacagttgaagaaactacaccaggatcatttgatggtgtagatttagtactttcctcagctggtggtgcagtgtcaaagaagtttctgccggaagccgttaagcgtggtgctgtctgtgttgataatacatcagcatttagaatggaaccagatgtaccactggttgtacctgaagttaatccagaagcattgaaaaagcatcacggcatcattgccaatccaaattgttcaacaattcaaatggtaatggctttggaaccagttcgaagaaaatttggtttgaaacaaattatcgtttccacttatcaagctgcttcaggagcagggcaagcagcaattgatgaattaaaaaaggaaagtcaagattaccttgatggtaaagacatgcaagcagatgctcatattttacctactaaaggagacaaaaagcattacccattagcctttaatttgttacctcaaattgatgttttagaagatagtggctattctcatgaagaatggaagatgattcatgaaacaaagaagatcatgctaaatgacatgaatgccaaagatatcaaggtaactgcaacttgtgttagggttcctgtgtcaatttctcatggggaaagtgtctactttactgttgaagatgagactgcaacggcacaagatattaaagatgcagttgctgcctttccaggtaatgttttggaagatgatattaaacatcaaatttatccgcaaccaattaatgcaacaggtaagcgagaaacttttgttggccgcattcgccctgattatgaaaataagggtgccttcaacatgtggattgtagccgataatttgcttaagggtgctgcatggaatacggttgaaaatgcggaatacctagttaagatgaacttactataaaaatttaaaaaaataaaaatgaaagcgcaaaccatgattaaaagtgattttgcgctttttgattgtggtagaatagttcaggattaaaaggagattgaaattttgaagacactaaaaaagttcgggatagctttcattttattttgttcatcgtgtttgataatgtcaaatcatgctgtgcaggcgaagagttattcaaataagcaactacggcaatatacgcttaagatgatgaaaaagcatcatttacgaggaagcattgaaattgtaaaaaatgggcatgctcaacgtgttagcttaggctacggttattacagcaaacgactgaaaaatggcaatacaaaattgctttatccagttggttctttgcaaaagatggttactgctgcaataattacacagttaatctaccagaagaaattcaatcagaatactaagatttcacgctggtatccaaatttgaagcatgcaaaccaaattacggtggggcagttaatgacacatacctcaggaattaacgtaattggaacagaatctaatcatggagttaatttttctgaaaatggcgcgatcaattggacaattgcccaagccaatgcacgagaaaatacgggacgcagtaaatttaattacaataatgctaactatgttttgctggcaggcattatcagtaaagtaacgggaaagtcttatgctgctaatgtgaaacagcgggttattcgatcattgaagttgaagcaaacctatatttatcaacaaattccgcggtcaaagactgatgcgatttcatatctttattctggtggtaaaaattacaatgctagtacctatgctaatcgtaatgttgtttctcaattgcctggtgctgggaatctattttcaacggctaatgattattataaaatccaatctggtatgcaaaatggcaagattctgactaaaaaacagttccattatcttggtcatttaagttctaaggttaatacttactcaggtggtttttatctgaaaaagaatcaaactttaaaagtcgcttatggcaattttggtgatacccactttgttaactggatgcaactgactactgataatcagaatggaattgtaatgtttttgaatcaaacttatggtagtaaaaatcatattcgtgcaatcgggtataacattttaaagcatataaaggctaatacctttattaagggctaagaaaaaagcttgttaactgatattgaagttaacaagctttttttaacgatgatttttgggcattttgctgcgctggccaaataattcgccaactaacttgaagaagccgtaagcaattagcaaaataccgataataataattgctctccgattaaaggcactagggttaaccactacgataattcctaaagcaaaagcaattaatgcctcgatcgctacaatagtaatctgaaaaattccgggtaatttacgaaagactagttgcctaattcgaatgtaggaatagataattaagaatagtcctaagaagtagtgagctaagaaaattagtagacggttattagaaattaacgcggttgataaagcaaaaactactaaatacgaaataataaagaagtttttttgtcggtcttttagactagattttgccgttgttaaaatttggtgaacactgaaaccaatccccgtgaaggcaactagggcgccaaaagctcgcactgcatattggggtagagttagactaatgattccgaatactaccagcacccaaccaacaattgtgtctgttgagaaaagcgctttggtcagttgctggctcttgatcgtctgccaaatgctggaaaataatgaaccaaagacgaaacgggttcgccgagatgaatcagccagtgaaaacaaaattgcaccaaaaccgccaaaaccatttttatcaagttcgttgatcttagttgcgccgctagagcttaaagcagagaagaggtcattagttaaagactcacgttcttctagggtggcgttaccaatccattgattgattagttgattatatacttgagattgagcattgcggtggcgtctggtgtcgaagttagaaccgattatttgccaggaaaaagcatcgtgttggcttagtcccttgcgagtactaccaacaatagtggctggaatatttttcgactcaaacaagcgaccgatgacgctaaagtctggcacaaagcggcgtagagtattttgcaaatacttattagggagctgagcaccaacttcttctgcaattccaggtgaatcaaaggtataaatacgtttgattctttttcttaatttgggctcaatattaatggcagcatattcagctaaattgccaccttttgagtgaccgcctaagtaataatcttgatcatcagctttgagaatagtttcgagcaattttactgcttgttgttgggctacagtgattttaaaactaatttcaaaatcttctttccagccaattagtgaatcgtcagtcccacgaaaagcaataaagttggtcccatcagttagttcaattttgattgcactaaattgagtatgttcagttaaggtactaataaaatacgacagttttgcatttttaaagcggtctgcatgagccattaatttaaatagttcttggtattgcaaattatcataacgaggatgatcatctgcaaaatagagcttggcagccttctctaaactaattgtcgttccgttacttttaacaatacctggtaattcaagataagaaaaaatagataaaacaagtgcatcaatatcattaaaaggcgatgttgagaagtcaacgtcaccacgccattttaaatatgtaagaatattattatctggatacatgctttaccttctttaaatataactttataattccatttcaattttaacgtaacttagaaaggatagtgcaagaaaaaagcccttttgagaaaattttcaaaagaacttaagattttatataacatcagttatttattgtggtataataaaacaggtagaaggggattctactacctgcacttgggtcataataagggcttataaaaacaatcaagacccaagagatagtatatcaatatgatatactaaacacaatatctttgtggctttttttaggaatactgttatatttattatatagcagtatttttctacgtaaagtcaagcgcaataaggtgtttggctttattttttacctaaattttgtcatgagtatcttttagtggcgatttatttttttagaaagcatactaaataagcccacctctatatttaatttatgggcttagcgttataatgtacttgatcaattaattacaactaaagtctttttggttatgtgtggctacgttgtaatcatatagttgatcattgataatcagagcataaatggttctgattagtttatgaattgaagcaatagctatctttttgaaccctttggtttgagaggatagctttttgctttcataataatctgctatatgacacggatttgtcttagctgcattatcaatttgtccaatagctcgataaagcaacttacgtgcgactgcattgccatgtttagtaatacttaaattagagtccatttctcctgactgatatctgcctggatcaattccgataaaagcattgattttattaggattactaaatctgcgtaaatctcctaactctgctaaaactctgacagcagtggtctgtgcaaagcctggaatgctttctaggttttctaaatcatgattaggcaaagacttcgctaacttaaccattcttgcgattaaattttctctttgatcacttaaattaagcaatctgtgtgcataatactgcacttgctcgacttctatgctagagcaagatacaactggataagcttgataagctaattcaattaatttatctgcagtccttagagcgtgtttaaaagcaatcccctttaagctcattaaccagttaataagctgttttttatcttctcttcttactaagtcacaatgaggatatcgcacaactatttgccagtaatttttacctttagcagaagaaaatagattttcaatttcaggaaaagtcgattgtagagcttggtgaagtcgatttttagccattactaagtcagctgttaactggtcatagaagcggctcaaagcattaagctgcttataagtttgagattgaagttgattaattggatgatgatatagtctttgaattaaggctaaatgataagcatcagttttatcagtcttattatgacgtagtcccatatccatttcttttttagctttaagaggattaagaattacataatcatagccatagtcttccagaaaagattgcagtgtacgtgaataaacaccggtagcttcaaaaataatttgcggatgtttagaaaaagcggttaattcatgaagcaattgaataaaaccaggacgattattagtaatggttagttcatttttgctttcaccaattagttcacaaacagtagaagtagacttgcttacatcaattccaaaagtaacttgcataataaaaacctccaaaacttagtagtaaaacgtatttacttaagaaatcagatctaattttctaaactcgacatctagtgtccacattcttcgaagagactattgaaaacttaagtaaaactgccagtttattatgcgacatcaagtgtctaaagacctcagggcatatcgttttactactactttaattctacaaaagaataaaaatagtgaatcaattatcccgtcggataactaattcactatttagcttagaatgttttgttttataaaaaagaggaaaaaggatgttaaaagaaggaacatatagtgcccgtgcacgcggcatggcaggctttgtaggtgtgacattaactgtagctgataataaaatttcaactgtagatttagatttatctacggaaacgccgcagtatggtcaaaaagcagaaaaaacattaaagcaggaaattttggataaacaatctgctgatatcgacgctgttactggtgcaacatttacttccaatggggttaaagaggctacaagcgaagccttaaaacaggcaaagtaggagataactgtgcacgttaatacatatttcatcgttgctgcaattattctagtagtatttttgttattcagatcagagcacaagtttgaattcttaaaggctgcaattttatttgtcattcagctgtgttgttcaacaattaatttcttaattttcatggtaattgcgtatttgatcatgagtcaatgggaccatgttaatttgggaaacttgtttttgctgttagcagcatttgttgtactttcaggtgtttttgtttattgggggatgcgactggctagcaaaatttttaagttttcgacaactacactcactttggtagaatattatattcagtggtcgttaatatatgttaacgcgtggtgctagttaaatcgttttagttaataaaaaagtccaatcttgttagactcgacttgtaaatagtaataatagaaaagagtctgatctgattgaactgccttaagcttaagcgttttagccaccatttacaagttagttttaaagatttagtgataatttgtcggcactggtatcgtttgtatgcaccggctgagtttactcatcggcgaaatattgatcaaattaaaactacggacagtctgattttggctttacttatctggcaagctaagacaggaattgaatcacaaagaagattctgtgaatgtttcaattgtttatcacactcacgttttaatcggcgttcacgtcagctattgcaattgatttatcagatacggcaagaaatgaataaaaaggttgacctgaatggacagttcttgatcattgacagctttccggtacctgtttgccaaccaattcgaaactatcgtgctaaaatttttcgcggttatgccaacattggttataaggccaccaagaaaatttacttctatggtttcaaagttcatgccattgttagcgatgacggttacattcttgattatgtcgtaacaaaggcatcagttcatgatgccagggagacagttgaactgatagaaaatacccatccatctaattactatcttcttggcgacgaaggctatttaggcaaagaactgcatcaacagctaaaacaaatgggttacgaactttggacaccatatcgtaaaaatatgacaggagctaaaaagcacaatgatcatcaattgatggctattcgcagaacaattgaaagcgacttttcgcttctgacctattacaatgccgagaacaatcgagcacgtagtctgataggctttcaaagccggttggaaattgcaattttagcttataatttggcttattgtctagaacgatttaactagcaccacgcgtatatgttacagtttatcaagcgatatttagtaacataaaacatattacttcaattacaaacttcatcagagtaggtaattttttagatccaaatttgtttgtagttgcgatactgccatcattcatttcagtttggattgcggtaattctttacaaaaagtcaattaaggcaatataaaaaagaggcgtgagcctctttttttgttattttctttctaaaatttcatccatcttttggaagaagagatccttattggctttagtaacaagagttacttctcttcctttaggatcccgtacaaagcttcctgcacttaacccatcagtgatgactcttgctttagccgtttcggtttcaacaacttctggatatagtgcgctgattgtagttagcacatcccaaaggtagagttcggctgatggtatagatacgattagactatagccttgtcctatcaagtccattgcaggatatttgcgtaaacttgcccagtgctggcgcaactcatcgttaagtggtaattcttccgtactttctaatccgaccatctgaattggaatatttgattcaaatacgcgtttaactgcgtatggatcccaaaacgagttccattcttgactaccgtcagcgttaaccatagcaacgttgccgtgcccatcaagagaaccacccatccaataaagtttttcaatgtttttctcaatgtcgggatcgacatctaaagcgcgagccaggtcagttaacggacctgtcataactaaagcgataggctcgtctgcttctttaattttttcgaccatgtctaaatgagcaggaagctttgcctgctgcgtatcaatcttgccactttcattgagcatgggaagataattaaatgaataagttgccatccgccactcgtgaggaaattggttgactgcacgtgagttggaacgagcaatagtcaaatcatcaccacgtaagttaaaaagatcggtcattttgcgacatgcttcaacactaggatcaatgtagccgtctgcatcaattgcaccaacacctaaaagtttgatatctggtgcttgtagtaagagcagataagatactaaatcatcgatattaccatcatggttaaaataaatttgtttcattgtttatgcctttcttaatatagatacttttattctaccaagcttttagttgaaatgatcgggtagatgattatttttacgataagcgtctctagaatttgggacctctttttgtgctaaaataaaaaacatgaatattgaaacattaaaaaaagaatttagcgctcgagcaaatgaagaaaaggccaatcatcttgttggttacatgcgaaatcaatttctattctatggcctacaaacaccagaacgtagggcgatttatcataattttttgaaagatgaaaagaagaaaaaagaagttgactggaagttgctagaccaggcatgggatgaagaacaacgcgaattgcaatattttgcctgtgattatttattggcaatgaaaaagtatattgtttttgatgatttagctaaaattgagcgttttgttagaacaaagcaatggtgggatacgattgactcattaatcaaaatttatggctatgttggcttaacggataatcgagtagacgatctaatgctcaagtggtcgcacgatccagatttctgggtaagaagggtcgcgattgagcatcaattattgcgtaaaaagaagatgaacaccgcgttattacaaaaaattattgaaaataatcttgatagtcaggagttttttatcaataaggcaattggctgggctttgcgtgattactctaagaccaatccagattgggtgcgtaacttcattgaactgcatcgagagcatttagctaaatgagtattaaagaaggcagtaaatatttataaaataaaaaactgatattcaatgattaaagtctgaatatcagttttttgctattaatagtttaattaatctaagtcttgaccgttagattcgataactttcttgtaccagaagaatgagtccttacgtgaacgagccaatgtaccttcaccagcatcgtttttatcaacgtagataaagccgtagcgcttatctatttgaccagtacctgcagaaacaaggtcaatacagccccatggtaagtagcccattaagttaactccatcgagttcaactgccttttccatttctgaaatatggtttcttaagtagtcaattctgtagtcatcgtgaattgacccatcagtttcaactttatcgtaagctccaagaccattttcaacgatgaataatggtttgtggtaacggtcttgcaattgatttaatgcaattcttaagccttctgggtcaatttcccagccccaatcgctacgctttaaggttggattcttagcaacagctttagccaaatcagttaattcatcaggtttaactttttcgctagaaacggtagtagtctgatagtaggagaagccaacgcagtcaacggtgccttcctttaggacaattttatcttcatcagttatatcaggacgatagccatttcgttcaatgtaggcttcaactgcatttggatattcaccaaaaacatgtacatctgagaaccagtcacggcgttgctcccatttatcagctaaaaggacatcatcacttgatggagtgagcggacgtacaggtgagtagttaatcatacaaccgatttggaaatcaggattaatcttgtgaccaatcttaacagctaaggctgaagcaaccaattcatagtgacctgcttgatacatggcggcttctttatctctgtcagtcatgccatctttgaacaaaatgcctgagttagtagccatcaagaaatcattattgaatgcagactgattatcaatttcgttaaaggtcatccagtacttaactttattcttgtagcgtttgaagcaaacttctgcaaaacgaacgaagaaatcgattacttttcggttggtaaaaccaccatagtttttagctaaattaaaaggcatttcaaagtgggagagggtaataacgggttcaatgccgtattcatgacaagtatcgaataagtcgtcatagaactttaaaccctcctcgttaggttcggcttcatcaccattaggaaagattcttgtccaggcaattgaagttctaaaagccttgaagcccatttcagccattaatttaatatcttctttgtagtgatgataaaaatcaatggctgagtgattaggataatttttgccttcaagaacaccgtcagtaatttcacgtggcctagtagctgaaccaacggtcattacatcagcaacagaagtaccttttcctccttctttccaagcaccttcaagttggtgggcagcaactgcaccaccccataaaaagtttttaggcatttttgctgaatacattaaatttttcctcactttcttgtatgtaattggaaacgcttacgagagccattttgccataattgatttttttaatcaagtaacacttatttgccattaactgttaaatcaccacggtcatagcgattacgtgactcagaaatttcaaaaggtcgtccgtcttcaaggaatgccttttgctgaatacataaaacaggatcatcatttttacattcaagatacttcatatcatatgcatcagatttttcagctgtaataatgcgatctgctcggccgatcttaagcccaagatcattttgaatataagagtagattgacttgtgcaaaatatctagggtgataccggggatgcggctaacaggcatcacggtatattctagtttagctggcttcttatttaaaattcgttgtctaataatatcgtaaacttcgtcatctttttctaaacaaagagcttttcgttcactaatactaggtttgcgaatgttaaaggcaatcacattactggttattgcgagagcattattgacatgacgagtaaagccggtatgctcattgacatcagaattaagaaaaatgtcgggaatagacttgcttgtaataaaggtcccatgtcccttgacagtccgtattaattttttattttgtaaaatctttaaggcgtgaacgactgtgacccgactagtttgatatttttgggccagttcaaattgttcaggtagttttcttgtatattttttctcaataatatctttttctatatcattggcaatgtcttgatagcgactcaagattctgcctcctttctattgtaaaggaataaattacatatacattctaacagtattcatttattaattgaaagcgtttgctaaaaatgatttattttttatgttaaatcatgcgtatgtaaaggatttttcttaacatgttgagaatatgcatttgaaaatgcttacaaaggatatataatattcgctgtcaggagataaaagtatatatcttttgctcgagatgattatataagcatggtaagactaagccgtgcatgtataattttttgtttacaaatcaatgaaagcgttttataataattggtgtagatcaataaaagctaattaaactataaaataaaaatttcaggaggaaatttattatggctgaacaaactatcatgttaaattgtagtgctggtatgagtacttcactcttagtaactaagatgcaagctgctgctaaggaacaaggtattgatgcagaaatctttgcttgcccagcatcagaagctgatgacaagatggcacaacaagaaatcgattgtgtacttctggggcctcaagtaagttacatgaagagtgacttcgaaaacaaggttaaaggtaagggtaaagacggtaaggacattcctttagacgtaattaatatgcaagattacggcatgatgaatggtgctaacgttttggcacaagctgaaaaattgatcaaaggtgaataattaattagctaaaatagctaaggaaagtgagacagattttatggcagaagaaaagaaaactccagaacaaaaagaacaagaaactttaatggctgctatgggtttaattgccaatggtggtaatgcaaagagtttagcctttgaagcaattcgcttggctaaaaaaggcgatattgcaggtgctcgtgaaaagttgaaggaaagtgacaaatcacttcttgaagctcacaattcacaaaccggcatgttaactaaagaagctcaaggcgaccacatgcatgtaactttgttggtagttcactctcaagatcacttgatgaatgctatcacttttagagatttagctggagaaatggttgatctttacgaaaagctgtatgaatctggctctcttaaaaaagaagataagtaatcgctgaaaatgaaaataactcctgcgaatgcgggagttattttttttcgataatttttgcctgatttgtgcttaaatataattattaggcaagaaatgagacgaagaaaaatgaataaacaaaacattaaaaaagaacagacagagacggctaagaaaagacatggaaactgtcaaatcttttgtgtaaatagttctttctcgtaaattgattttttaattatttatttaatcaaagtaggattctaaggtgtcctgaacctgaccaaagcctttatgaattcgattgaaataacggtcattgtagctcattgcctgaataccaataaaagcatcaagcgactgttcagttggaaactctgccttaggcttagctttgcgcttgatcacattgttaaatgattcaatcatgttagtcgaataaattgaagctctgatctgcttgggatagttataaaagaccagcagatctggttctatgtctttcaagcttctgataacatggctgtaaaccttgccccatttggtatagaagtcatgcaggacagctgtggcttcttctttgtttgtctgttgatgcacctgtttgaattcgttcatgatcttttcacgatcgtcgacgcgtactttagcgcagatattgcgcatgacatgaaccaaacagcgttgaaaatgagctttaggataagtcctggtcaaggctgttttcatgccaacaacaccatcagaaagaaaaagctcaacttgctttaagcctcgggatttcatgttttgaagcatatctgtccagacttcaatgttctcactaggagcaatgcagtagtcaatgacttccttatgtccattaggtttaatgccaatggcaatatagactgcttcacgctcaaacgtttctcggcgcaaaggaaggtatgtcgcatccaaatagacgcagaaaaacttgtcgcttagcttgcgtttgtggtaagcctcaacctttggaatcatctgcttggaaatatttgatacctgagctggactgtaatggctgccatacatcttttcaattagatcggctatttccctggtggtcacgcccttggagtaaagcttgataatcatgctttccaagatatccgagtgctgcttgtagtcaggcagcgtgtgctgatgaaattgaccgttgcgatcccgaggcacttgcacttcaattgggccaaattgcgtatcaactttgcggaaataagcaccatttctagagttgccagtattccagccatttctggcatagggatcatagcccagaaaggcagtcaattcagcttctagcaagttattaacagcctgttgtagctctttgcgcaataaatcatttattttgtctggattgaatagagcttgagcaaaatctttggtaaaatcattcatgaaggagttcttctttctgtatgtgttttttttgttcaaaccaatcatacgagaaaggaactcctttttctaatgtttaaagaaataaatttaaggaatcattcatccttacacaaactattttacagtctcaagacatgaagatagcattaagtatatgtattttagtcgatatttgttaattagatatattattactattttcttttttaccaacttgatgtggctaattattgatgtaaattatcatagtgttcttggcattattgtttcggcaattatgacaatttatagtgggattgcttcgattgagcagttaactaaaatgcataatcgaaaacgagaggtcccaattagcaaagtttatcttgaagtacaagcagctttaaatttgctttttataatgttgacgtttttgccattgggtaagtatttattcccattcatcgaaaatcaaagtattatgttctttatgacaactttgtttttagctggcattttattgtgtgtttggagcgaataccgaattcatcaaattatgaatgatcaagatcgttatcacaaggttatagagacttttaagaagcaccaacaatagttcatgtaaagttacatgaactttttttattagaagtaatttcaaaaatatacattttaaaaaaacaaaatatatcgtatgtcaataaaaagcgtttacattagaaagcgctttcgctataataaggttgttcagatttaatgatgtttcagaatattgggggaaagaaatatggctgattcaaaatctggctcttttaaagatgcgctagctgcaaaagcaggtaaatttgcaggttcacgttttgttagagctattatggacgctggttatagcgttatttcattttcaattatcggggcagttttcttaattttgaatgtgctgcctcaagcatttccaattccaggatttgccgcattttatgcgaatactttaggacgctttagtggcttattccaagtagtttacaactcgactatgggtatcttggcattagtatttgcaggtacttttgcttattcatacacggatatttatcgaagagaagagaaaattgatttggtaccgatgaacggtttgatgatgttcttaatggcattcttcattacttttccggaacttatttggaaaaatggtgctgttcaatttattactacacgcgtggtgctagttaaatctttctagacaataagccaaattataagctaaaattgcaatttccaaccggctttgaaagcctatcagactacgtgctcgattgttctcggcattataataggtcagaagcgaaaagtcgctttcaattgttctgcgaatagccatcaattgatgatcattgtgctttttagctcctgtcatatttttacgatatggtgtccaaagttcataacccatttgttttagctgttgatgcagttctttgcctaaatagccttcgtcgccaagaagatagtaattagatggatgggcattttccagcagttcaactgtctccttggcatcatgaactgatgcttttgttacgacataatcaagaatggaaccgtcatcgctaacaatggcatgaactttgaaaccatagaagtaaattttcttggtggccttataaccaatgttggcataaccgcgaaaaattttagcacgatagttgcgaattggttggcaaacaggtaccggaaagctgtcaatgatcaagaaatgtccattcaggtcaacctttttattcatttcttgccgtatctgataaatcaattgcaatagctgacgtgaacgccgattaaaacgtgagtgtgataaacaattgaaacattcacagaatcttctttgtgattcaattcctgtcttagcttgccagataagtaaagccaaaatcagactgtccgtagttttaatttgatcaatatttcgccgatgagtaaactcagccggtgcatacaaacgataccagtgccgacaaattatcactaaatctttaaaactaacttgtaaatggtggctaaaacgcttaagcttaaggcagttcaatcagatcagactcttttctattattactatttacaagtcgagtctaacaagattggacttttttattaactaaaacgatttaactagcaccatgcgtattactacatttactaagactaaaatggtggcaggcggttatgaagcctcaacaaatggtattaccagaattgctgccgttggtatcttcactggattagtaattgcatggcttacagttcagatctaccgttacactgttaagcacaactggagaataaaaatgcctgcatcagttccatctggtgtttctaactcatttagcgctttgatcccaggcttttgtattgctgttgtagttgcattgattgaactaattttggtaactttaggaactgatattttccaagttctttacattccattctcatttatcagtgcaattgctgatacttggtggggctttttgattataattttcttgattcacttcttatggtggttcggaattcatggtgctactatcatgagctcattctatactccaattgttttagctaatatggctgctaatgtaaatggtgctaatcacttctttgcaggtgatccgatgaactcctttgtaattattggtggttcaggtgctactttagggatggcaatctggttagcctttggttctcgttcagctcaattgaaagaaattggtaaggttgaattggttcctgccatttttaatattaatgaaccattgttattcggtttgccaatcgtttataacattaacttgcttgtgccattcatttgtgctccacttgcttctggcttggtgggttacatcgcagtaacttcacatttagtacctaagattattgtgcaacaaccatggccaactccagtgggtttgagtggttatcttgcaactactagctggcaaggtgccgtgctttcaattgtttgtgcacttgttgccttcttagtttggttcctattcatcaagcactatgacaatgtcttattgaagaaggaacaggctgacgctactaagaactaatagattaattttgatatagataagattgttaatttgaacaaaaaaaagaccataactacaacacaattagaagtagttatggtctttttgctgctgagatggcgattttaagctgcaatattagctaaaacattgtcacccattcgtcttaattctttctttgcgcccatctttaattggaaattgtaaaacatggtttgtagtttgccgtgtttctcacggtcaaagctaagcatgtcttcagaaaaggtgatttttacaccttgatcgttgtcttcagtgacataattaatcactaattccattcgatctgtcttaaaatgagccccatagaccttgtttctttcgtaatcggttaattttacttgggcaccatctacttcgtatttagtacctttagcaagcgttaccggcatgtcattaccgcgagcttttttaatagcaggaattaattgttcttcaaggtaatcaaagaaatccttagccttgaagttgaattgtttagtaattgtaatcatacttttccttctctcatctatattacttatgctttcatcatatctttttagaaaaatagagtctagcattttttagctaggctctacttataaataaaagttttagtctaaatcctcaccatttgaggtgatagcttttttataccagtagaatgaatctttaggataacgcttgagtgagccattgccacggtcatcacgatcaacatagacaaaaccataacgtttcttcatctcaccagtcccatttgagacaagatcgattgctgaccaggtagtgtatcccatcaaatcgacaccatcaattgtgacagcatcccgcattgatttgatctggtctcgtaagtaatcaatacgatagttatcatgaattgagccatctttttcaagggtgtcagcagaacctaaaccattttctactacccatagaggcttgtggtaacgatcccagagctcatttaggccgattcgtaaaacatctggatcagttgcccagccccaagcattactctcaagatatgggttaactacaccaccagcagaaacattaccgttagctttagcatcagcttcatgagtggttaaaacgtttgaggtatagcaagaaaaacttaagaaatctgctggatatttagcgattaattcataatcttctggtgtatcattaagcttaatcccatcacgttcatatttcttaagacgatagttagggtagcggccgccagtttgaacatcactgtagaagagcatctcttgcttggcttccagcactttaagttgatcagcaggatcacaagtgtaagggtagtaggcagaataagctagcatttggccaacacggttgttggggtcaatttcatgggctaatttaactaccttagcgctagctacgaattgattgtgagcaccttgagcacgattttgttcgctaccatcgattaaaccgccacccatataaggagccatgtccatggcgttgatttcgttaaaagtaagccaatatctaactttgcctttgtagtgcttcatcacgatatcagagtagtgaacgaaagcatcgattaaatggcgatctttccagccaccgtagcgggtaattaaagaaagaggtgtctcatagtgggataaagttaccagtggttcaatgccatacttagcacattcatcaaatactttatcgtaaaaggctaatccgtcttcattaggttgttcgtcatcaccatttggcaaaattctggaccagttcattgatagcctgaaaacatcaaagcccatgtcggccattaatttagtatcttcttgatagtggtgataaaagtccgttccttggtggctagggtagtagtaaccgtctaaaatagttggaacagcacctttaggtagactaaattcttgcccccaaactagaggcgtagctccagtttcaccattaggctttttccaagttaccttacgcggttcagttgctgaaccattagttaaaacgtcaacggcatttaatcctttacagccttcatcatatccaccttcatattggttggcagcagtagcgccgccccaagtaaattcttttgtaaatgacatatattacctctaaaaacgattattatctaacaatacataatcacgggtatcgtaacgattcttgctgatagaatattcgacaggttgaccattagtaagccaaataatctgttctaattcaagaataggatcatcttttttggcatttaaatatttttgatcatattcgtctgctttattagcacgaatcttacgataagcgtgtccaaattttaaattaagattcttatggatgtaatcataaattgatttatgcaagatgctctcatcaagatcaggaaccaatttaactggcatgtatgtatgttcaaggataagaggcttatcattataaagtctcaatcgcagaatattgtaaacgggttctgttttcttgatttcaagatttctttgcatttgttcatcaggaaactctacagagaaatgaacaatttgactcttaacggcatctttgcctagttgatttcttaaaccaatgaatgcattagctggagcatcaactttttccttaattggaatttctccagtaacgaaggtgccaagtccggattgtttataaaccagaccctgtcgttcaagaccatcaaatgcttttttgacagttaagcgactgacattaaattcttgagcaaatgtctcttgatcgggaagaggctcttgcttattgtagatgccttgtttaattctttttcttaattcatttgctacttctagatattttgcctttgccatgtttttccatgagactgtaaaatagtttgtgtaaggatgaatgattccttaaatttatttctttaaacattagaaaaaggagttcctttctcgtatgattggtttgaacaaaaaaaacacatacagaaagaagaactccttcatgaatgattttaccaaagattttgctcaagctctattcaatccagacaaaataaatgatttattgcgcaaagaactacaacaggctgttaataacttgctagaagctgaattgactgcctttctgggctatgatccctatgccagaaatggctggaatactggcaactctagaaatggtgcttatttccgcaaagttgatacgcaatttggcccaattgaagtgcaagtgcctcgggatcgcaacggtcaatttcatcagcacacgctgcctgactacaagcagcactcggatatcttggaaagcatgattatcaagctttactccaagggcgtgaccaccagggaaatagccgatctaattgaaaagatgtatggcagccattacagtccagctcaggtatcaaatatttccaagcagatgattccaaaggttgaggcttaccacaaacgcaagctaagcgacaagtttttctgcgtctatttggatgcgacataccttcctttgcgccgagaaacgtttgagcgtgaagcagtctatattgccattggcattaaacctaatggacataaggaagtcattgactactgcattgctcctagtgagaacattgaagtctggacagatatgcttcaaaacatgaaatcccgaggcttaaagcaagttgagctttttctttctgatggtgttgttggcatgaaaacagccttgaccaggacttatcctaaagctcattttcaacgctgtttggttcatgtcatgcgcaatatctgcgctaaagtacgcgtcgacgatcgtgaaaagatcatgaacgaattcaaacaggtgcatcaacagacaaacaaagaagaagccacagctgtcctgcatgacttctataccaaatggggcaaggtttacagccatgttatcagaagcttgaaagacatagaaccagatctgctggtcttttataactatcccaagcagatcagagcttcaatttattcgactaacatgattgaatcatttaacaatgtgatcaagcgcaaagctaagcctaaggcagagtttccaactgaacagtcgcttgatgcttttattggtattcaggcaatgagctacaatgaccgttatttcaatcgaattcataaaggctttggtcaggttcaggacaccttagaatcctactttgattaaataaataattaaaaaatcaatttacgagaaagaactatttacacaaaagatttgacagtttcttttccattctatttctatattagatttatatttttattatatagcaaagtctatactttagtaaaaaagagacattattttactatttttatagcttaacaacgtctctttttatgaattatttcaaatctttaataccttgatcaattgcatcatcacagtcaatagggagtcgtaaaaccatttgaccatcgatttcaattcctttagggatttggataacaccagggaagtgatatccatgatgagctttagtttcatcatccaagtatacagatacttggccatcggctttgacgccaattttataatggtgaccgtcacgatcaaattcatttacaattttttcttcattattcaattttaaatacccgtaaattgcaataataaattgaacacttttaatcaagctgcttgatagattagatctaattctctttcaaagatttcatctggtgtatgatatgccaatatctttcttggtaaagagttgcaccaggtttcaatgtctatgatgtcttgtagtgaataattgtctattgcctctcccttaggaataaatctgcgaatgagtccattatgtctttcaacggttcccttgtcacaagatgtataaggatgagcatagtaaactaaagtatttgatacgtcttctaagcttgaaagatctgcaaactctgagccattatcagtggtaatggttttaaaaatatcattccaatgttcgctgtattgcctttggagttctttaaaggcctgcatgacactgacagaagtcttgtcaggaatacgaagaattaagaactcacgactcatacgttcagataaggttagcagcacctcatcatctttgctcttatgtccgagaactaaatcgcattcccaatggccaaactcattacgtttattgatttctttaggacgttcttcaatgcttctgccaagttttttcttatttctgcgaatacgatgaagcttggtattgcgtttaagcttctctggcaagtcgtaattatgtatatctaatagaccttggtcgacataattgtaaagagtcttagtacagacaacatctctgctgctaaatgcgccaacagcggtggcgcgattactgcacacatcaagcgaccagccgtctttaaagaaatgtttgtggacatagcgcatgaattgagttttcctgagaaagtctgatttacgtccacaatttttacgatgagcttgatatgcatcatgcccttgagtagccttatatcttttggctttgccatgatacagttctacagtaccgcgcttaacctcataactgatagtagaaggggaacagtttaattcacgggcaatggcacgcaaagaatagccatctttcaaacgcaattgaataataactctttcctcgaatgataaatgcttgcctttaatgtgatgattcatggtagaatgtaaagagtccattttgacctcgtttctaaatgttgtgtggtaactacattctatcaaactaaactgagacctaaaagttagacacttttaggtctttttctacgtaaagtcaagcataataagaagtttggcttcattttttgtttaaatttcaacttaaacatcttttagtgtcgatttatttttttagttagacacgacaaataagcccagatccatatctgatttttgggcttagcgttataatgtacttgatcaattaattacgactaaagtctttttgattatgtgtggctacgttgtaatcatatggttgatcattgataatcagggcataaatggttctgattagtttatgaattgaagcaatagctatctttttgaaccctttggtttgagaggatagctttttgctttcataataatctgctatatgacacggatttgtcttagctgcattatcaatttgtccaatagctcgataaagcaacttacgtgcgactgcattgccatgtttagtaatacttaaattagagtccatttctcctgactgatatctgcctggatcaattccgataaaagcattgattttattaggattactaaatctgcgtaaatctcctaactctgctaaaactctgacagcagtggtctgtgcaaagcctggaatgctttctaggttttctaaatcatgattaggcaaagacttcgctaacttaaccattcttgcgattaaattttctctttgatcacttaaattaagcaatctgtgtgcataatactgcacttgctcgacttctatgctagagcaagatacaactggataagcttgataagctaattcaattaatttatctgcagtccttagagcgtgtttaaaagcaatcccctttaagctcattaaccagttaataagctgttttttatcttctcttcttactaagtcacaatgaggatatcgcacaactatttgccagtaatttttacctttagcagaagaaaataaattttcaatttcaggaaaagtcgattgtagagcttggtgaagtcgatttttagctattaccaagtcacttgtcagctggtcatagaagcggctcaaagcattaagctgcttataagtttgggattcgctttgattaaccggatggcgataaagtctttgaattaaagctaaatgataagcatcagttttatcggtcttgttgtagcgtagccccatattcatctcttttttggctttaagcggattaataacaacatattcatagccgtagtcttcaagaaaagcctgcagtctgcgtgaataaacaccggtagcttcaaaaataatttgcggatgtttagaaaaagcggttaattcatgaagcaattgaataaaaccaggacgattattagtaatggttagttcatttttgctttcaccaattagttcacaaacagtagaagtagacttgcttacatcaattccaaaagtaacttgcataataaaaacctccaaaacttagtagtaaaacgtatttacttaagaaatcagatctaattttctaaactcgacatctagtgtccacattcttcgaagagactattgaaaacttaagtaaaactgccagtttattatgcgacatcaagtgtctaaagacctcagggcatatcgttttaccactactttaattctacaaaagaataaaaatagtgaatcaattatcccgtcggataactaattcactatttagcttagaatgtttactatgtctaaatttaataaagaacaaaaaatagaaatttatcataaatggaaagatgaaaatatctcaatcagtcaattggctaaagcgtacagaatgaatctagctaatttagactatatgcttagattaattgatatgcatggaatagaaattttaactactaaaaaccaaagctattccaaagagtttaagcagcgaactattgaacaagcaatctttggcaataaaccatacttacagctgtctttggaactggggtttaaaagtattggcatgcttaacaattggattagagaatataagaaaaacgggtataatgtcattatcaaacagaaaggacgccctgcccgtgaccaaagaaaagcagaaatctcgcaaggaactggagaaagagatccagcagctgaaagaagaaaacttgcgattgcgtattgtgaacgaatacgtaaaaaaactaagtgccttggatcaagaagatcagaagaaatagctagggtgattacggatctaaggcaagaattcaaagttagtttaaattatgtattagctgcgattgcagagcaccctgagctacctataattgccagaagatcatactacaagattatcaaacgacagcccgtcaagcctaaacggtcaaagcttattgctagaatccatgagatttttaatcatcatcaaggccgctatggatatcgcagagtagctttgcagttaatcaaagagggctggaaagttacggagaaaaccgttcgctattggatgcataaattaggtcttaaaggcatcaggcgcaataagcgcaaatattcaagctataaaggtactattggcaaaatagctccaaatttaattcatcgtgatttcttcgcagccctgcctaacacaaaatggtatactgatatcactgaatttcatcttaataatgaaaagctttacttattgcctattctagacggctgcggtggcgatatagtttcttatactatctccaaacatccagatatggatttagtaatgacaatgcttgacaaggcttttgccaaagaaacagctcttaataactgcatttttcatactgatcagggctgtcagtatcaaagccctcgttatcagcgagctttaaaactccatggtattactcaaagcatgtccagaaagggcaactccatggatgatgggctaatggagaacttctttggcctgctcaaaactgaaatgttctatgatcaagaatacaagtatcataatcttcaagaattaactcaagcaatcgaggaatatatcgaatactataacaacgaaaggataaagagcagattaaaaggcttaaccccgaaagagtatcgaagtcaagcctctattaatccaatattttaattgtctactttttacgtctcagtacaaacaggtccgaatggactttttattttttattaagtgttcaatttaattttacaatcagcgaattttaaatacctcttttattatttagtttcgtttgcttgttcacgtttaagtaagatattgtcatacttcttagcaaatggccaatagatcaaagtagaaattactagagtacatgcttgccaaatggccatcttccaacctccgattaggaatccggaaataacggctggcgtagtccaaggtgcagccataccatttaatggtggaacaataccaaatctgattacgcagtaagtagagatagctacaacaattgaagttaagaagaatggaattgcaaggaatgggttcataacgataggcataccgaagaggaatggttcgttaatgttgaagataccaggtactaattccaatttacctaatgatttcatttgtgctgatttagcagcaattaagatgaagataactaaaccgatagtaataccagaaccagttaagttaataaagttgttgtagaattcgttagtaacaacgtgagcaccgttggcaatagttaatttgccggctctgtataattgagcgttgtcaaatgagtttgcttgaagaagtgaaccagcaatggaaccaacaatcaaaccaccgtgaacaccgaagaaccagaagaatggtactaagaaagcgataacaactgcaccaccaaatgaatctgatacaccttgtaatggtgattgaatggttttgtatacccattgtaagaagtcagtgtgtgcaaagttattaaatgcaccgaagataagcatagtaacaattaagattacaccagctggaatcatagcagtaaattggttagatactgcaggtggaacttgcttaggaagcttaatagtccaaccagctttcatcattgctgagtaagcccaaccaacaatcaaacctacgataatggcagcgatcataccgtcaccaccaagccaattgatgttgataacaccagttacaggagcttccaaaaatgtttgtaaagcatgaggtaacttatcaatattttcagcaaccaccttgccgctcatttgaccgttattgataccggaagttaaagcggcttttaatgggctgtcgattgctaaagtttgcagcattaagaaggaagcacatgcagtaagcccaccagctaatggttcatagccttcatttttaacataaatataagcaataccaattgagccccaaagtgccataacgttaaaagttgtggtgtaggcttgattgaaaattgcccccccaaccagaagcattaattgcattagccactgctggaatagggatgttggataaaattaagaaaatagaaccaacaataatgaatggcaaagtatagatcataccattctgtaaagcaacaatagctttagtattaacaaatttcataatgggtggcagaattttgctgttcacaaaattactgaacccagattgtttttgatcagtcattataattcatctccattatctttaagtaccttttgaaaccaatagaatgatttcttaggcacacgttttaaatcttttaaatcgtggtttgatctgttgacgtaaacagcaccgtagcgtttttccatatcagcatgagaacttggaatatcaattaatccccagccaagataaccaagcaccttggcgccgtcatcaaaaatagcatctttcattgctttgatatggtcgcggtgataagcaatacgctcatcatcttcaatcatatgctcaccgtcccaagtttccttgaggccgataccattttcaatagggaaaataggaatacggtagtagttgcattcctaaatcctagtggatcaattgcccagccccaatcgtttgtcttaacatatttggactcaactccgcccttgttaaggtaatggttaggagcttcaccatcaggaattttatcgctagataaaacccaggatgaatagtaagaaaatgctaggaaatcagctttagctttcttcataatttctttatcttcatctgtaatgtccatttgaatgccatgatttttgacatattgcattacttctggtgaatagccgcagccggtgtcagcatcgtaaatattaaagtttaaaaactcttgtacttgctttgctgcccaaacgtcttcaggtttactcgttgctggataaatttgttggtaagcaagcattccaccaatttttacgtctgagtgattttcgtggatgtaatttgctaattgaatatgacacatcaccgtatggtggaagatagtgtacatatcatccaaacttttatctccagattcgtaacctgaaatattaaaaacttcatcttggaaatatagattatgctcgttgaagacaatccaatatttaactcgatcactgaaatgatcgatcatttttttaccaaaacggacaaaggcgtcaactacgtgccgtgacataaaaccgttgtactttttggctaaattaagcggcatatcaaagtggtaaagacagatcattggttgaatgccacgtttaagcattgcattaactaatcgatcatagaagtcaatacctttttgattgaagtcgccgtctccatcaggacaaacacgagaccatgaaatttgaatacgatacatgttcatgttcatgtccttcagtaagtcgaggtcttcgtcatatctatgatattcatcaattgctacatgccagtcactagtattgtcagtagcaggtcggacatcatagactgaaagacctttgccatcttcattccatgcaccttcagtttgcatactggaaactgagttgccccaaaggaatgtggatggcaatttgcgcttttcagtcatctagatcctctcttctctgtaagtgctttcattttttttacacaaataagtatagcataatgcatgcaaaaataaacagctttttatataaaaatatatactttttacgcgtggtgctagttaaatgagactgtaaaatagtttgtgtaaggatgaatgattccttaaatttatttctttaaacattagaaaaaggagttcctttctcgtatgattggtttgaacaaaaaaacacatacagaaagaagaactccttcatgaatgattttaccaaagattttgctcaagctctattcaatccagacaaaataaatgatttattgcgcaaagagctacaacaggctgttaataacttgttagaagctgaattgactgcctttctgggctatgatccctatgccagaaatggctggaatactggcaactctagaaatggtgcttatttccgcaaagttgatacgcaatttggcccaattgaagtgcaagtgccccgggatcgcaacggtcaatttcatcagcacacgctgcctgactacaagcagcactcggatatcttggaaagcatgattatcaagctttactccaagggcgtgaccaccagggaaatagccgatctaattgaaaagatgtatggcagccattacagtccagctcaggtatcaaatatttccaagcagatgattccaaaggttgaggcttaccacaaacgcaagctaagcgacaagtttttctgcgtctatttggatgcgacataccttcctttgcgccgagaaacatttgagcgtgaagcagtctatattgccattggcatcaagcctaatgggcacaaggaggtcattgactactgcattgcgcctagcgagaacattgaagtctggacagatatgcttcaaaacatgaaatcccgaggcttaaagcaagttgagctttttctttctgatggtgttgttggcatgaaaacagccttggccaggacttatcctaaagctcattttcaacgctgtttggttcatgtcatgcgcaatatctgcgctaaagtacgcgtcgacgatcgtgaaaagatcatgaacgaattcaaacaggtgcatcaacagacaaacaaagaagaagccacagctgtcctgcatgacttctataccaaatggggcaaggtttacagccatgttatcagaagcttgaaagacatagaaccagatctgctggtcttttataactatcccaagcagatcagagcttcaatttattcgactaacatgattgaatcatttaacaatgtgatcaagcgcaaagctaagcctaaggcagagtttccaactgaacagtcgcttgatgcttttattggcattcaggcaatgagctacaatgaccgttatttcaatcgaattcataaaggctttggtcaggttcaggacaccttagaatcctactttgattaaataaataattaaaaaatcaatttacgagaaagaactatttacacaaaagatttgacagtttcagttaaatcgttttagttaataaaaaagtccaatcggattagactcaagttgtaagtaaattaaatagaaaagagtctgatctaattgaactacctcaagcttaatcgtttctctcaccatttacaagttagttttagtcgtttaaatgtaatttgtcgttcactatataatctttatgcgcctgataagcttacgcatcgaaaaaacattgatcaaacaaagctttccgacagctccatcttagcgatgctcatttggcaaactgaaattggaattgaatcccaaagaagattctgtaaattttttgttggcttatctcattctcgctttaatcgtcgagccaagatgcttttgcctttaattcgctgcatccgtcaagcttggaatcaagaggtaaaggttgctggagaatttttaattattgacagttttcctgttccagtttgtcagcctgttcgtaattatcgtgttaagatcttccgtgacatagccgatattggctataaagcaaccaagaaagtctattattatggtttcaaggtgcacgcgctagtaagcgatgatggctatttgcttgactacgcagtcactaaagcatcagtgcatgatgccaaagaaacgacagaattgatgattaatgctcatccaattaaccattatcttttaggcgatgaaggctacttaggaaaagacttagctgccgagttaaaaggtatgggctatgtcctttggacaccatatcgaaaaaacatgaaaggtgctaaaaaacataataatcatcaactgatggcaattagaagaacaattgaaagcgacttttctttgctcagttactataacgctgaaaataatcgagcaaggagcttagctggctttcagcagcggctagaaatagccattttagcttataatatggcatattgcctagaacgatttaactagcaccacgcgtatactttttataaatacaaaacaaaaagcccatcatagcgggcttttaatggaattaaataattataaaaatttaatgtgcttgttcaaaatctgcaactgcgccacgtaagtttgcattactcttcaaactgcaaagcacaatttcaggtttaatacttgctggattgacttgtttgcgaatatagtcaatttcgcgattcaataacggaattaattctggattattagaaatgccaccgccaattacaattttgtcagggtcaaaactttgctgaacgttgtaaattgctaaggctagggaatgaattaaggtttgacgctcatcgctggctactggatcatcttcgtctgctaaagcgaagactgttttaccatcaagttttttaccagttctttcgttatagcggttagccattgccactggggatgccagatcactaacagattttgtaccaatgcccatatagccgaattcaccaccaaataggtgagcaccatgccagactttttgattaataatgatggcaccaccaatacctgtaccaataacaaagaaagccatgctgtcactgcctttgccagcaccttctgctaattcgcctaacgcagcggagttggcatcattttctatagaaacaggtaactcaaaacgcttttttaattcgtcaacgattttaaagttatggatgtatggaagggcgctagtgccaccaataatacctgtcttttgatttacagcgcctggtgcagaaattgcgacaccttttattttggtattttgtttaattttattaacttctgcagtcaaaatatcgtaaaaactatttaaatcctttggcgtattaacagcatgtttatcctgtaatttaccgtctttccaagttgcgattttgattgttgtaccgccaatatcaattgctgctaaatccattatttattcacctcataaaaatctatactttttaagaacatcataaatatttatgaaaacgttgtcaataaaagattgcatgctaaaataagcatgtaaagtacgcgtggtgctagttaaatcgttctagacaatatgccatattataagctaaaatagctatttctagccgttgttgaaaacctactaagctcctggctcgattattctcagcattgtaatagctaagcaaagaaaagtcgctttcgattgttcttctaattgccattaactgatgatcattatgctttttagcacccctcatgtttttacgatatggtgtccaaagcacgtatcccatacgctttagcttggctgctaagtcttttcctaaatagccttcatctcctaaaagataatggttaattggatgagcattgatcatcaattctaccgtctcttttgcatcatgtaccgacgccttagtaactgcgtagtcaagcagatagccatcatcactcactattgcgtggactttgaagccataatagtagatttttttcgtcgctttataaccaatatcggctatgccacggaagatcttaacgtgataattgcgaacaggctgacaaactggaatcggaaaactgtcgataatcaataattctccacctacctttacttcctgattccaaccctgacggatacaacgaattagaggcaagagcattcgagctcgacggttaaaacgagaatgagataagccaacgaagaatttacagaatcttcgttgagattcaattccaatttcagtttgccaaatgagcatcgctaagatagaactatcaggaagcttggtctgatcaacatttttacgatgtttaagtccatcaggcgcataaagcttatacagcgagcgacaaatcacatttaaccgattaaaactaacttgtaaatggtgagaaaaacgattaagcttgagatagttcaattagatcagactcttttctatttaaattacttacaacttgagtctagtctaattggacttttttattaactaaaacgatttaactagcaccacgcgtatgtaaagtaaatgcggaggcatatatggtaaattcaatttttactaatcgaagagcagttagagattttagtaaagaaagtatttcagatgatgatcttaagaacttgattgtcgcttttcaaactgcaccttgtgggatgaatcaaacagatgtgatgaatctagttgtggttaaggatgaaggattacgcaataagatcaaagaaaaaactgataatgcttgctacaatgcaccggtattgtttgtaattaataccaaaaaagatagcatgtttggtgaacgagacgcatcttgtgcagcagaaaatattatgctggcagcaacagacttaggattaggttcagtttatgtcatgggcggtgcagttaggttaaatgatgccggtgaattgcaaaaagaattaggcattgatcctgcctttcaaacgagtgttatagtgccagttgggaagattgctgaaaaaccagaagaaacagatcgttccaatcgttatcaagtcaccatttattaaaaaaccgcgagctaattggaaaattagctctatttttttgcctaaagtttaatgagactattttatgcaataatattataagaaataataaatggagcaattatgaatagaaaaattttaataggactcgctgcaattaccttagcaacgactttaactggttgtagtcaagtttatttcggtaaagatgcagtaactattggtgaagtaaaaaaagctaagaaaacaacagttgctaaaaagaaaacaaaaccagtaaaaaagcaattttcagacaaaaaacaagttaagcctaaacagaaggctaagccagataagaggaaagataaagaaaaagcaactagaatctgggatgccgctaaaactgttaaactaaaaaggaaagttaataactggggtgaaaagtcagggcaaacttatcaattctatgatggaaaaaagagtttaaagactaaaaagggtgcaacttaccccaaagtattgactactaatcgatttattctaaataaaaaaacaattgagatcggctacagtccaattggcaaaacaaaatatgactataatgtgcttgccattgctaatgatgattttaaatcgtggcataatacttacttgttctgtttgaaggataaaaatccaattatcttgcttgatcaatctaaaaacgaaaatccaattatggtaaaagtagttaaggatcgcactttaaataaggcttttagcaaattgataaaataaatatgtaaaagcgcaacaaaaaagcatgagaaaattaattctcatgctttttttgaaattgtactcggttaactcgaaattaatcgtggtcaacatcgtctgggaagaatgcaagacgttcgccttcgccaagttcttcttcgatttcaagtaagcggttgtacttttcaacacgttctgaacgagctggagcaccggtcttaagttgaccaccgttaacagcaacagctaagtcagcgatgaaggtgtcaccagtttcacctgaacggtgagaaatcatagtgttgtaaccgttcttacgtgaaagacggatagtttcaagggtttcagtaacagtaccgatttggttcaacttgataagtgaagcgttaccagcaccttccttgatagccttagtcaaaagtgcagggttagtacaaatgaagtcgtcaagaacgatttggatacggtccttgtggctcttagtgaacttaaccataccgtcaacatcgttttcgtcgtatgggtcttccatagaaattaattctgggaattcgtccaaaagcttgtcgtagtaatctgctaattcttcatcagtaagaaccttaccttcaaggtggtacttgtgatcatccttgttgtagaagtatgaagcagcacagtcacatgcaatagcgatatcttcacctggcttgtaaccagccttgatgattgattcgtgaagagccttcaaagcttcttctgagttcttcatgttaggagcgaaaccaccttcgtcacctaaaccagtttcgtaacccatgtcttcaagaaccttcttcaaggtgtggtatacgttaacgatcttttcgaaaccgtcacggaatgaagtcttagcaactggagtgatcatgaattcttgaatgtcgataccgttgtcagcgtgttcaccaccgttgataacgttgtggaaagtttgtggcatttcaagatcagtaccgccaaggtatctgtacaatggaaggtgagcatcgttagcagctgcaactgcaacagccatagatacacctaagatagcgttggcaccaagacgacccttgtttggagtaccgtctaagtcaatcatggtcttgtcaatctttggttggttgtatgggtccatacccttaagagcatcgttaatttcagtgttaacgttgttaacagcctttgaaacacccttaccaccaagacgtgaaccaccgtcacgtaattcaacagcttcgttttcaccagttgaagcacctgatggaacttcagccttacctacgacaccgtttgaaagagtaacgtgaacttcaacagttgggttaccacgtgagtcgaaaatttcaagtgcgtgtacattttcaataactgatttgagcattaataaacctcctcaaaaattatggtatgtttttcataccatacggaacaatttttgctccgctttacatctcaaattttagcctaactttgtgacggtgtaaacatatgaaagcggtttacattttaaaaattagtaaagcagcctaaaaaactctatatcaaaggactataatatatgtattaaaataaatacaaaaaataaggaatctaaaatggaaaatattaaattaattgttgactcaagtgccaatatgaataatgatccggcgcgtaatttggaagtagtgcctctgacaatttcttttggtggtgaggactaccttgataatcaagatttgaatatgaaggaatttttgtccaatatgaaccaaaataatgtggcaggcaaaacaacttgtccaagtattcaagcatggcttgacgcacttgaaggaacagaaaaagcgattatcgtcacaatgaccagcgggatgagtggcactttttcttcagcccttcaggcaaaagcaatgtatgaggaaaaacatcccttgagcaaaattatagtagttgattcaagaagtgcgggacctgagctagcaatcatagtccatggtattgagaaaatgctgcaaggtgaaatgcgctttgtagatctagaagaagcaattgctaagtttagaatgcagactcatttgctttttgttttgcaatcactacataatttatctttaaacggtcgtgtttcaccagctgtagccaaaatcgcaggtttgctcaaaatcaacttgatcggaacagcaagtaaagaaggaaaacttgagccacttactaaggctcgtggaatgaaaaaggccatccgtgaaattattaagtatatgaaggaagataattatcacggtggcgaagtgataatcgatcattgcgaaaatgaaaaagatgcagaaataattaaaaataaaatattggaggaataccctgaagctcaaattactattcgtccaatgcatgctttatgtagtttctatgctgaagaaggcggcattatggtaggctttcatgaataaaaaataaggatcacgctcaagtgctgaacgtgatcctttttaaatcgctaaaaatagttgctgcgaaatactgaaacaaacgattgctaaactagtagcaccaagaacatcagaaggatagtgggcctttaaacttaaacgagagaaaattaccattgcccaaatagctactacggcaataacaaatccggttccaagatctttggcaaatagttgtagtacgattaagcccatggttgtggcacctaaaacatgaccgctgggaaagctatagccatcttctttatcggaatgtaataatggtcgcttgcgccgaataagtttttttagaataataccagaaatgtcagcaaatcctagagttcctaatacccaaagagcggttagatttcgttcttcgtttaaaagtaggcctgctaataatacatcccaaacgaccattagtttaggatcattaataaaagcgataacctgccagctgtagcaatcatgacgtttgaccaattggtggtgaagccagtgatcaaatagattgaaacgacgtgaatttttgatattaaaaataagccagagcaaaactgccgcagacagtagcagtacaaaataattattcattaataagaaaatccccaattactatataagtacaatctattttaaccggaaaaacaaaaataatgctaatctttaaataaaattaacacctgaattgtcaaattaagtgcaacagttaggttatgaagagatatattgcttgaagagttcctctgctgtgtgatattggaggattcggcgatatttgtggttaatggcatcagttgcctgttgaacataagcttttgacttgtctttcatgctcttgctcttagggaagaattgacgcaaaagaccattgcagttctcattggtgcccctttcccatggagaatatgggtgagcaaagtaaatctggcagcccttgatcttggtcatatccgcaaactcagagccattgtcaaacgtgattgatttaaaccaggcaggatgtctgtcaatctccttttgaagcagcctttggcatgtgcttgcccgatagtcaggaatcttgataactacttcaaagcgtgtggttctttcagtcaaagtcattaaagcaggctgattcttgcgtctgacgcctttaaccagatctccttcccagtgcagcggagcttttctgtcttcaacctccttaggacgctgttcaatggaattgccaagatgcttcttgtgcaaagcgtgaccgccatggctgtgatgacgcttgttcctgcgtcttttgagcttcataggcagatcaatattgcttatgtccagcaagccctgatcaatatagcgatagacggttggtgtgctgggacaagggtagcctggcatagtccttttgaattcaccaacgaactcatcgatgctggtggcatcaaatttagctttaaagcgtctggagagcattctcaaaaagacagcataatgcttcaatggattgcgctgatagcagtttttgcgacgcttctcataataaatctgtgcagtatcagcgtaatagtgctcatacaataaatagctgctgtctctttgcaggacgcttccgcgtttgatttcgcgactgattgtcgacttatggcagccaacttcttgagcgataacagtacgggaagttatgccggaatccagcattgcttgaatttgtccacgttgtacgctggttaattgatgatagtgcttagaaatgctagaatttgaattggtcatgaagatcttcctttcttgatttttcgtcacttcaagtttaggtcttcatggcctttttgtttaacacttagtgttgcacttcaattttaaatccgggaataaaattaacattatttttcaattatttagttttggtgattaaatgttggcttagttaacatatcatacttgattaattccttagcatcgaggtcttctttgtttatgtcaacgacattaatttgctgactagtataagtagtgtaatagaaaatccccttgtcaaggttggtaccatcagagtaaatagtgtattcaaatgaattagggccaacttgatcaagtcccttttgttgttcaacagaatgcaaaatatggaagtaattgtctacgttttcttcctcacttttaccaacaggagcgttgaacttgttaaaagctacacgaacaaagcgcgattctgaatccatcccacctggcaaattgcgtgaaccaagcccacggctgtagccattcatattgacctcttttgaaaagttgttcttaggcattgcaggtgaaacatcagcataattatttaaattaaataattgacatgaaaactgaggattgttagtcaggcaaccgacaggattatcataaacgtgcattccatctttatcggtttcaacgacaattgaaacacctgtcttatcggcaattaaccaatgaagtggggatgcctgcatcttgtcagagaaattaaggttaacaatgttgatctttttaagtaataccttagcatccgctacagttgcgcattgacccagaatccagggaataaattcaaatgaagcaatgttgtctttattggcaacttcatcatagtaggtagcattgtcagggtagttaagtcctgccatgcctaaacctttttcattagctgcgtcaaagtagagcggataattaccagcatcaagtgcaataccaaccatagcataatgatgcttcatttcaggcatcttgcggaagttgaaagcataattgcgtggggtaactacaacttgttggccgaaagtaatctcaagatcgaggttacgtccaaaatagtgatcttgtggactgaaaataattgaagtacacataatatataatctcttttctatatctttaaataatgtgctattagcaagtgtagcatttaaatattaaaaatgactaagataaaaaagaccaagcattgcacttggtcttttccacatattgacaaaaggagtgtacaggatttgaacctgcgcgccaaggaaaacttggttcgccggatttcgagtccggtgcattaccactctgccaacactccgtaacaaaagtattataacctacttaactaaataatgccaaaatattttatttttagttaatgtgaatttattaataatttgccttgtcaagaatagaaaataatagtatacttattacaatcatcataaagggagttgtgtttgtcaaattaaacagatcacatatggagggatttttgttgacaaacataattaaaactaaatcattctggttagctacggcgatgaccttattttgttctgtagcaggaattttcttggctaaattgccatacgtaaacttaatcggggcattggtaattgcattgttattagggattgcactgcaaataacgcctcagagcgtacaagctgaagcgaaagctggcatgggttttatttccaacaagtttttaagattagggattatcttgttaggatttagactcaatttgactaagttggctgatgcaggagttaagactatactggttgcggcgctggcagttagtggaacaattgtgcttacttattggcttagccgtaagtttggtgctgaagatgagttagctattttgtcggcttgtggttgtggagtttgtggtgcagctgccgttatgggcgtgtcaccacaaattgagacaagcgatgaagacagaaaaagagaaaacgaagttctagcggtggctgttgtttgtgtcatgggaacggtgtttacattacttgaaatcgtgctcaaaccgcttcttggcttaactgatacacaatatggggtagtagcgggtggatctttacacgaaattgctcatgcggttgcagcgggaagtgcttttggtgaagtcagtttggatagcgctctaattatgaagttatctcgtgtattacttttagcaccggttgctttaattgtgggctattggtaccaaaagcgtttggttacggaaagtgaagcagaacatactagagcaccgaagaaattaccaattccttggttcttgggtggatttatcttaactagtattattggtacatttttaccaatgtctgcgcggactttagacttcttagtgcaagcagcatatgtctttttagggatggcaatggctgcattgggaatttccgttaacttcaaggtaatctttaagcgtggcggttcagtctttggggctgccgcagttagctcaacttgtttgttggtattcatgattattatgagtaaaattttcttttaaacttacttaaaaatgtgcttgttcgggcacattttttattacataaaacatataatttgataaaagcgataacaaaatatataatagttatataaagtaagttactaattgaaagagggctaatttatgaagtatcctaaaaccaaagaaatattaaatcaagctgttgctgatactactcaattaatgatggttgtccgccaacaacattggtatatgcgtggacctgaatttttaaaattgcacccatatttagacgaggtaatggatgaacttgatgaacaacgtgacttgatctctgaaagattgattacaattgatgggtcaccatattcaagcttacaggaagtgcttgatcatactaagatcgaagctcatcctggtgaatggggaatttcaactagagaaagatttgcgactatcattgctgattatcgttatttggagcacctttatgaagaagggatcaaggtaagtgacgaggaaggcgactatggctcaaatgatatcttaacgtcatgccatacagatattgaaaagagaatctggatgatgcaagctcaaatcggcaaggcccctaagattgatgaataaaatatagattaaatgaatgcgtccacatcctacttgggaaggggatgcatttttgttataatcgaaaactatagaatagaagggggatttttttgcaaataagaactgctactgttcaagatttaagccaagtttgtgctttttacaaacaagtttgtcttgatcaaaaaacggatgattatagtcccgactagcattggggtgtttacccgagtgaagaaggattaaagcagcaaattaataatgcgactgtaattatagctaccgacaatgataaggttattgaactttgtcgatcatgttaataaaaatgcaactaaggagcacgatcgaaaattcttaaaacaattgttagaagagtctggaaaaacattcgatgatttagtagccttaacaaattcgcaagtaagtattttttctgatagtccaattattattgctaatttcactaatggcgcacatttagtagaaatgctggctaattacattaaagaacatggcggcgggttttatttgaacagtcgggttacaaaaataatagatgatggaaccaaagtatcagggttgcaagtgagaaattcagcaggtgaatttactattagtgctaaagctgtagtaattgccacaggcggtgcttcttatgaaaaggatgatcttcttaataaggtcacaccatctgttgctaaggttcatgtctttaacgaagctagtcctgccaatactggtgatggttatagtttactgaaagctgttaatgcagagttttcaaataatgatgtttataagaatggaacgattgattttgccccacaattatttatcacttggaatactgtacctgattattcaaaaacaatgttaattgatgagaatggcaaacgtttttctaatgaggcaccatataatttcttgaatttaagaacggaaatgtacaagcatggaagtgaaaagtattatttgatttatgatggcaaaaaaatggattcatcatttaaggaaaaactagataaagtagaagaaaatccccaagtatatgtacatgccaattcaattgttgaactagctaataaattgaagattgatgcaaatagtctaaaagatacttttgtaaaatatcaaaatgctactgagacaggtaaggatgaatttggcaaagacaaaacgcatcttgaaaagtttactggcaatgacttttatgcagtatatgcaatgccagggtcatggggaacaattaacatgaaaacgaaaagtggagcaacgaagcgagcaattaaactgcaccaatttggtagaatatccaatagaagatagctgtagatatgatcaaagatcataaacacaactgctaaagtttttaattgattgccgtctaggctgaatgcttttttattcaaaatcatcatcctttttatgtaattgataataatcattatactgtattatgtgtctattacaatgctcttggctaaaagatttaatgacttcacttatcctgtgtttatttgataaaaagaaaaagtcaatttttatttttctttcgcagtgatacaagaaagcataaaattaagatgtgaattaaaagtattagaagggacattttatgttaaaaaatattatttttgattttggcaacgtcattatgaattacaatcctgatgaaattttatatcattatcaattaacatcagaagaacatgatttattgagaaaaacgatttttgaatcaaaagaatggtctgaaattgatgcaggaaaaatcgatgaaaaagaggcgactaagatttttattagtcgcgtacctgttgagctgcagaagaaggttaagcaaattatgacaacttggcctgaaaatgtagatttctatgaacctgtttttcgttttatggatcaactaagaaagcaaggctatcatatctacgccttgtctaatacagggatggaatttgctaactttgttaaaaattcttcgatgggtgattattttgatggttttgtcttttctgcacaggaaaaaatgatgaagcctgataagcagatttatcaatgtttgttaaaacgatatgatttaaagccagaagaatgtttatttgttgatgatttggaaaataataccaaagctgcaagtgaattagggatacaggcgttcacgtttaaaattgatcgtttagacgaattgaaaaagaaaattttaggatgaaggatagacgacttaagttaaaacttaagttgtctatttttgcatttcagccgcaaattttgaccacttagtaaattacggttgaaaaatagcaatatgatagtaaacttaaagaaaaataagaataatagctaaaaggtaaaaatgaggagaaagaaaatgttttttgacaaaaatgaagacaatgaagtgaaaattgttgataaagttttaagcaatgatagctttgacaaattgagcgtggatttagtagatattgattttacattggttggcggcgatcagttcgaggtacattaccacggtccagaagataagaggccgattgtgactaatgcgggtaaaactcttgaattaaaagaacctaaggttgaacgcaagaatggtaaattctggaaaagaaagcatgttgaaatcagtattgtgagtcaagatgatattgttgcattaaaagttacagtgccggtagaacataaattagttaacgctactttgaagttgactagtggtgacactgttgtaaaacaagttgagttagagacagtaacatttactgctcttagtggtgatcttcatttgaagaaagtaaaagtagatgaagttgcaataactgaaacttcaggtgatattaaattaaagaaggtattgctaaatcgtggtaagattaagctagttagcggtgactttaccattaaagatagccaaattcttgatgatcttgatgtggcaacgacttcaggtgataatttggctgaaaatattgaagtggatcaatgtgatttgaagactgtagtcggtgataattcaatctttggtggtaaggcaactcatgcataggtaggtaaggagacaaatggcagtcacttagggatgcacacagtgtcaggtgataatacagtaaaataattagaatattaaaaagagaccagctgtcttcatagacaaaccggtctccttttaattaatgctactggttgttattagcaactaatcatttttgcatccaacgttaggaaaatatgcttttcatacttttcttttctttattcagccataggataacaagaccgcccacagattagctatttatgcttctttcttgcgttgggttcaaagaacctaccgaagtcctaaacggattgcttaccgtaaactttcacttgatgtgcgttctatatattgtacctaatagtatcatttaatcttgccgattaagctactcgttcttttctgacctgttatagcatgcttttgatcgcatacgtcacagcaaacaagcttgttggtcattacattgaggttccaattaagttttccgccttaatattaggtcaaaaaccctgatgcaagctgattttcacatcaacttattgtgcttgccagctcagaaaaagccttacgctgaaatacattgactaccatcgcctggcagaaagtcttttggacctatctctgataagaatatctccaagattcagaaaacagcaggtatccttgctgttcgccttatctgacttacaggcaatttacggaaaggattatcagtccgttatacatccgtatcagcagcgtcttctataatatagaagaatgggttgttagacaaatgatattactcgaaaattaaaaatatttttgtcaagggaaaaaggaataactaaatataacgcaatgtcattaagttaagacattgacaaattgaatctaatctctgtagaaccgaatcattatgatttggttctttttttgcataaaataaaggcgaaaagaacctaccttttcgccctctgattaaattattaaaccttcaaaattattgccagaaagctggtgttaattatgaaagcccttcacagaaatattttagatcgtcttgatcaaattatcaatgatactggaaagcatattcatgattttatcgatgatcctcatgccttcactaggaagcggtttttagatgcagctacagtcattaaaactactattaatatgcaaggaaaagatttgaccagtgagttgtttagagcttttggccaaaaagctattaaaaataacgataaagtagtcagtacttccgcttatgtccaacgcaaaggtcagctttcacccgcatgttttaagcatattctaactgtatttaatcagaatttatttaatatccagttatttgatcataaatatcgtatatttgccattgatgggtctgattttaatcaaatctggaatcctaaatcagagaatatcgttggaaatctcaatcataaaggaaagccatattgccaaattcatgttaatgcactctatgacctgttaaataatacttatcaagactgcatctttcagcctaagtcaaagatggatgaacgtaaagccgccgttcaaatgcttaaaaagctaaattgcggaccatatatagttactatggatcgaggttataccggctttaacatgattgaaaattgtaatcgcctgcctaactgttattatgtcatacgtactaaaacgggatatggcgcatttaaggaagtagctgagttgcctaatcaagagtgtgataaggatatagcttgctgggtgactacctctaattattattatgaaacccataaggctacagaaaacgttcatttggttaaccatcattaccgtcaatatataaaatatcggtctaaaaataccaaagatggcagctgggactttggagagttatgtacaataaaatttcgtgcctgtaaatttagaattaatgatcctaaatcaggcaaagaagaatgggaagttgttctaactaatctaaatagagccgattatcccttaaaaaggatcaaagaaatctaccatttgcgctggggcattgaaacttcattcaaaaagttgaaatatgctttaggtagcgtacagtttcattccaagcaggatagatttattgaaatggagatctatgcccacatgattatgtttaacgcagtcagtcaaattgatgctcaagcatatgtaccacaaaaaaaatgcaagtatcaatatgcgatcaatttcaaacagtcatgttttgtcatccaggctatgtatataatttcttcttcaactgaaatctttaaaaagattcttattcaaattagtcattacacaattccgatcagaccaggacgaaaagacaaaagaaatctcaaacccaaatcagctgtatattatttatatcgtgtagcctaatttctaaacaagatttgggtttatttggcatgaaaaaagagcattcaaatgcgataaatcgcaaatgaatgatcttaaaagtccaagtcgataatttgtcaatgtcttaacttaatgacattgtaaatataactgtttactacttttctttatccaacttcatcctcaaaattggataaggattgctttgaccatcagttgctgaacgttccactactttaaatcccatgtgttcatagaatccaactgcttttggattttgttcattgacagctaattcatcaatgtttaacttttgcataccataattcaacaatttcctgccgtatcctttgccgcgtgctttggcattaatgaagagtatctcaactttttgaccattaattcccatgaagcctttaatttgttcatgatcgataatgattaataaatgctccacttgtttaaacgcttgtggtacataattgcgtatttgtaagatttcatcattgtttaaaaatttatatgtggcgcggacgctgctttcccagatggttaaaagttcttgctcagttgattgattaagtttgataatttctttaatttgcataatagttttccttcaatattttggtaatagtttagcatagatggagatttctctgatgctataaacaaaaaacaatgacacttaccgaattaaaaacgccattgcatctaatcaaagaatttgtttagattaacatataatacatgaatatcaagtaacataagcgacttagaatcgtgaggatgactcccgaagaatcttctaggttgctttttcttgtgagggaaacaaatggaagatttatttgcaaaggcaccaattaagcaagtttattttaaattagcactacctgtagtcttgggtatgatcactaccatgatttataatctggcagatacaatgtttgttgccaaaacaggcgatactaatctagttgcaggaattacgatcggtgcgccactttttacttttttaatagctgttgccgacatttttggcttaggtggttcgtcagttatttcccgcttatttggtgagaaaaaatacgagctcagcaaaagaatcagcagtttttgcttgtatggtggaatgattactggtctgtttttaacagtaatcttgctaatctttgaacatcctattttaactatattaggagccaaggcggcaacttataacgatgcagctgatttttatcgtgtgctttccattggagcagtctttattattctgagctttattccacagaacttaattcgaacagagggattagcgattgaggcgatgattgccacaatgacaggaactattttagctatcattttagatccaatttttttatttgttttaaaatggggtgctacaggagtaggaattgccaatattttaggttatgttgtaactgacttgattttagtaattatgattctgcaaaaagcaagattcattactctagatcccaagttaattaaaattaatgcggaatcaatcaaggaagtagtagcaatcggtattcctggatcaattactaattttgctcaaagctttggcatggctttattgaattcgtcactggcaatttatggtgctgataaggtcgctgcaatggggattacacaaaaaatatatggaattgtgattttggtgattgttggttttgcctttggtgcacaacctttattaggctacaactatggtgctcagaattggcggcggcttagagatattcttcgctttgatattttagttcaagttgtatatgcggtaattgttggtggattattaattgtttttgcccgtcctgtcacagcattattcatgaatcagccggatattgttagtgccggtagttacatgttgttagctacgattgttactacgcctgtagtaggaatcgcattggtttatacaactgttttccaatctgttggtaatgcttggggtgcctttattatggcaatcgctagacaaggtgtgatttattttgtggttctagaattgatgaagatgacgctgggctatcacggtattgtttggtctcaagcaattagtgatatattgacatgtgtaattggtttctttatttatgaaaaagctttggatttaaaagataagattggaagcgcaaaaaataaagagtaaataaaaatgagagaaaagctagtgcagatatttctgattcagatgatgcaagtaactacaatatagttagagaattagtagaaggataacgttgagatgatgaatgccttttctgaccttagaattaattttttgcacgatctggtcttgatcattgatgatgaataattttttgatcatgattagcataagaattggttaaatcaaagcatcataatgaccgtttagcatgtaaatagactatcgaaacattatttaaatattcaataactaaaaaataaatccctgaattgtcaaattaagtgcaacagttaggctatgaggaaatatattgcttgaagagttcttctgctgtgtgatattggaggattcggcgatatttgtggttaatggcatcagttgcctgttgaacataagcttttgacttgtctttcatgctcttgcccttagggaagaattgacgcaaaagaccattgcagttttcattggtgcccctttcccatggagaatatgggtgagcaaagtaaatctggcagcccttgatcttggtcatatccgcaaactcagagccattgtcaaacgtgattgatttaaaccaggcaggatgtctgtcaatctccttttgaagcagcctttggcatgtgcttgcccgatagtcaggaatcttgataactacttcaaagcgtgtggttctttcagtcaaagtcattaaagcaggctgattcttgcgtctgacgcctttaaccagatctccttcccagtgcagcggagcttttctgtcttcaatctctttaggacgctgttcaatggaattgccaagatgcttcttgtgcaaagcgtgaccgccatggctgtgatgacgcttgttcctgcgtcttttgagcttcataggcagatcaatattgcttatgtccagcaagccctgatcaatatagcgatagacagttggtgtgctgggacaagggtagcctggcatagtccttttgaattcaccaacgaactcatcgatgctggtggcatcaaatttagctttaaagcgtctggagagcattctcaaaaagacagcataatgcttcaatggattgcgctgatagcagtttttgcgacgcttctcataataaatctgtgcagtatcagcgtaatagtgctcatacaataaatagctgctgtctctttgcaggacgcttccgcgtttgatttcgcgactgattgtcgacttatggcagccaacttcttgagcgataacagtacgggaagttatgccggaatccagcattgcttgaatttgtccacgttgtacgctggttaattgatgatagtgcttagaaatgctagaatttgaattggtcataaagatcttcctttcttgatttttcgtcacttcaagtttaggtcttcatggcctttttgtttaacacttagtgttgcacttcaattttaaatccgggctaaaaaataaatctttttatagaaaaaatatataaccaaacctagtgatacattttggctgtgttttttgcaaaatttctcgctgaaaaacaatttttgcagagaaataaggaatctagattgccttcataaggtcattagctacttgaaaataaaataaccatattttaataattgtttttttatcgtataatgacaaatttgtaaggctttctcttaaacattattctgaaatagttttatactaaaactagatctgagtgtttaataaagtagagaggtcagaataatgagtaaacaagagaagacagatcttgaaaaagatgatattcaagatgtggtaaaaaagttaaaagttgatccacaaaaagggttgacttctcaagaggctcaggctcgcttgcaaaagtacggaccgaatgccattactgctaagcaggaaccaatggggctaaagtttttgaagactttactggtccaattgcttatatgattgaagcagctgcaattatttctgcaattattggccactgggatgactttttcattattattgtattgctgttgttcaatgcctgtattgaattttggcaatctcgtaaagcgtcaaatgcgttagcagcgtggaagaagggcttagctccaactgctacagttttacgtgatggtaaatttgaaacgattgatgcaagcaaattagttccaggcgatattgttaaaattcggctagggcaaatcgtaccagcagatttgcgcttgggactacgcttcaattgatcaagctgccttaactggtgaaagtttgccagtaactaaaaaagttggtgatgaggcctactctggcagtattgttaaaaaaggtgagatgaccggtgttgttattgcaactggctctaatactttctttggtaaaactgctaaattagttgcttcagctggtggtaaaagtcctgctcaagaagcaatgtttaagattggtaatttcttaattatcgttgccgtagttttagcggtaattatggttgcttctattcctgtcgcaatgccaactgtcttttcaattacgttggctttaggtgcgttgaacctatctaagaaaaaggcgattgtttctagactagcttcaattgaagaaatggctggggtagacatcttatgtagtgataagactggtactttaaccaaaaatcaattaaccttgggtgatacaactttaattaacgctaaagatgctcaagatgtaattaaaattggcgccttagcttcaaggaaagaagataatgatccaattgacaacgcagttattaaagctttgaaagatcagagtgttttagctgattggacaatggaaaagtttattccatttgatccagtatctaagcgaattgaagctcatttaattaataataatactaaagaagaattatgggctattaagggtgctccccaggttgtagctaaattaagtagtgatccagatgtccaaaagaaagttctagataccactgatgctttagcaaaaagagggtatcgtgccttaggtgtagctgaaagtaaggatcaaggcaagacttggacaattcttggtgtattgtcgatgttcgatccacctcgggacgattctaagaaaacaattgatgattgtaagcgtgaaggtatcagtgtcaagatgattactggtgatgacaccgcgattgcgattgaaactgctaaaaagttaggcatgggtactaatatttataacgctactaaagtttttcctaagaatcttgatcctgatcatgttccagccgatttggaaaagttgattgcgcaagctgatggttttgccagagttttcccagaacataaatatgcgattgttaaaactttgcaaaagcaaggtcatattgtagcgatgactggtgatggggtcaacgatgcacctgctttgaagcaagctgattgtggtacagcggttgctggagctactgatgctgctagaagtgctgctgccttaattttaacttcacccggtttgtcagttattcaaactgcaatcacagaggcaagaaagatttttgccagaattacaagttacacaatttatcgtgttgctttgacaatgaacattatgttcttggtagttttgtcatcaattttattgaacttccagccattaacagcaattatgatcgtggttatgtcattacttgatgatttaccaatcatgactattgcttatgacaatacctatgtttctaagaagccaatcagatggcagatgaagaagattcttacaacttcatcaattttgggtgtatttgctgtaatccaatcaatgttgcttctatttataggatatatgtcagttaaaaatcctggctcaattagcattttccaagttggaaacctttcacaattgcagacaattatgttcttgcaattagttgctggtgggcacttactattgtttgttactcgtcaaactcgttggttcttcgaaagaccatttccagctccaatacttttctgggcaattgtaattacacaaatttttgctgcatgtgcatgctacttgggctggtttgtaccaaggatttcactatggatgatctgtgagatttggatttataacattgcttggatgtttatattaaatattattcggatgatcatagaaaaagttcaaaaataagtagatacataaaagataaaaagcatggcttcggtcatgctttttgtttggtaaaaattatgcataatgtttgaaggcacttacaacgggtgttattataatggcgaaaagagaaacggtatttttcacataagggtgattcaaatgttagataaaaataaatttgatcaaaaacaaacgtattcgattagaaaattaactattggaactgcttcagttttaattggattgacttttttgggttttagtggaagtcaagtacatgctgctgagactactgctaatcagccagaaaagtcagaacaagttctaactgttgaatctaaacagcaatctactcaaaatagttcatctgttgaaaaggttgaaagaaatggtgatcaatatcaaaataaaattaagacagaaatatcagctgcgtatcagaaattagactctgaggataaaactgatcaagcaattattctcggtgaaaataatacaactagtggactaaaaacaaatggacaaggtaaaaatgctaatataactaacgtgccggctgacggctcaattaagtatgattattctattaccgctaagaacaagaacacgaatcagactcaagtagtttcaagtgcagaagcaggtaagaataataatgccattttaattgagcaaaatgctcaagaccctgaggctcacttaactctagaaaatgtttctaaaactgatcaaatgattggtaatagtaaaaatgactctaaccctaatcctaatgatgaagcagttttaatgatcaatgcatggtattccaataaggaaaaactaagtttgcaaatcagtagtactaaggcagcaaatgtagtctttattaaaaatggtaaggtgattaatgataatgctttgtcagtttattacttggcccaaaatggtacttggtattcttatgaagaaatgatgaaaaactttggcgctgccgcaattagtaacgtaagacagattgggttcagaggagttattcctggtgaaactactgcgcaaatgaatgtacccttgatcattgatccaacaggaaatcaattcaatgaaatagatctaaaagctcaaaacgaccagagtatttatgtacgcacatataaacaaccaaaaaagctttggacagttgatgaagctcagaatactccaattagtttggtaactaggaatcaagatggtagttatgatgctgtcaatataccacaacttattgagagtttaccaaaagttggtgaagttattcagattactaattctggtaatatattggacacaagtggaaaagctttttatgagggtggtagctataagattcaattatcaaagattcaacaggtaattgataaatatggctattcagtgaatccgcaggcaagagatttaaccactttaatgccattttatagttatgatacaaataccagtcataaggtaattattcatggacttaataaagaagatcagaataagagaattttctatgttgaagtacattaaattatcgctactaaagatgagactttaaaccaaggatctaaagaagcgcaagactggaattatcatcaaggtgtaactggagtatttaatgtaagaaatcctaatgctgtctataatggatacttattagaaaatattccagttaatgcacaagatgttcaattggttggcatcatcgatgaaaaaggaaataagactgaaacttgaaagctaagattaacgctccttccccgcgcctcttggctttttcttatcaaaaataaaaacgcaggatctctctgcgttatactttaagtgtcgacctaaaaagtaaaggagatcctgcgcaatgaacagtatagaacaaatcgacacagaaaatgatactaaatccttaatttcttcatttattaatctaattggtctagctaagttaactaaacaagtcaattttaagcgtaaatccaccgtttcattaaccatgattatctcttggctgatgtcagtacattttgctcggctttctttattcagagctaaggatgacaaacgtttttccgttagaactgctcgcaatgtacttaacgatggaagaatcaactggcaaaaactattatgcttgattgcagcccggctcattggctgcttaaaaccatttatcgataaaagacgccgacttgcttttatcgttgacgatacgctgatggctcggtctttttctaaaaagaccgaattgctagctaaagtctatgaccatgacaagcatgagtatttgaacggatatcgtggtttaactttaggctggagcgatggcaataccttcttgccggttaactttgccttgatgtcaaccaaaaccaagaaaaatatgattggagctgctcccattactgctgatgaacgttcaatttctggtaaaaggagaaatcaagctcagagaaagatgaatgatgtaactgtagagttgattagacaagccttacgattaggagtagaagctaaatacgtcttattcgattcttggttttcttctccaagaatgttttggattttaaagaagatcggtttagatggacttggcatgatcaagaagagttcaaagatttattacatttatcgccattgccgctatagcgttaaagacttgtatgatcgtttggctgcttcaaacatccgtaaaaagaaacattatctttattcaagcatagttgaggctcaatatcatggacataactttttattaaagctcgtctttgtctccaaccgtggaaacaagaacaagtatttggttttagctactactcagacaaagcttagccctgaagaaatcatccaactttatggtcgtagatggcaaattgaaacatattttaagacgtctaagcaatatcttgctttagataaatctcaagttcaaagctatgatggccaatgtggctatatcgcagttacagcaataacttatgatctattgacctggcaggaaagacaaaatacagatgataagacaatcggagatttattctatctaatgaacgaatccttacctgatattagattcgtagatgcattggtctacttaatttcagaattaaaagagcttaaacagaatagttttgaaaagatagatgaagtaatcaatgactttattaaccaactgccacgattcatacaaattgcactgaaacagatcatataaaaactaattacgtctaagaaagctcaatagtgacaggacttgagcttgattttggtgctttcaattttcagaaataagattaataaaattaatggtcaaactccagccggtaaatatattgtgacagtttcctatagattaaatggttctaaagaatcagatatgaagattgaaaatagctatgttgtagacatccttccagtaaaagcaccacagcctgatacacctgatgtaccagaaactccgactcaaccgacaactccaactcagccaactgcaccatcagaaaataatgtggctccacatcctgaaacgatagacaagcaagaaaaaaatattccaccaaaagctgagcgggtaaataagacaaagaaaacgagtaaaataaataaagtagcaaagaataagactgttgctccaaagagtgaaaaagtgtcatcatgtcaatttactaagaaagaaataccagttaagttagccaattctaaggtaagtgcggtatctgttaaagaagttaaacttcaaaaagcagttacacaaaggaatgttttgccacaaactggtgaaaaacaaactgggttgacggctattggggctgtgtttgccgcaatcgcaggaatattcagtcttgcagcttttagaaagagaaactgattaatttaatattcaaaaagcaatagagtcttcagtgaagactctatttttgttgtgtgtcgggcatggcatttgtctagtctagtgaaagtctagatcacgggtagttgtcgccaagtgtagcgaaccacaagccgttagcggtgacgctatgggtgaaggaagtggctagcgagttttccgagcctacgtacagaaacctggtcaggccaaatggtggatgagactgcagcacaagttaaagtccaaaggacaaccgtaaaaccaagacggtaaaccagggggcagtggaaaattaaagatgaatgtcttaccccgagagatctcgtggacaggtgaaaccgagtaagctttaatatcagcgatcgtaagcctggtcgaaaaaggttaatcgcgagaagtcagctgaggtcgtagtagtgctgaaggttttgtaatgaaactggagcgaagggcctaatgtttgtaagagcatatctcgctataagcaatgttcagacagtccggataagaggatagcctagcacaaagagaacgtaactctttgatggtgaaagcaattgggacaattctgaataaatttacaagtagaaatggagatatcacgagatggaactaattgaacagattttaagtcaaaataatctcaaggaagcaatcaggagagtcaaaatcaataagggagcgcctggtgtagacaggagaacagttgatgagcttgatagctattttaaaaagcatcaagtagaaataaaggacgccatcatgaagatgaagtatcgtccgcaagctgttcgcagagtctacattcctaaagctaatggtaagaaacgtcctttaggaatacccacggttgttgaccgagtaatccagcaggctattgcccaagtattaatgaagatctatgatcctcattttagtgagcatagctatggctttagacctggacgcagtgctcatgacgctattgaacaagtcttggaatatttaaacgaaggctatcaatgggttgttgacctggatattgagaaatactttgacacggtaaatcatgataaattaatttcaataattagagagcaagtaaatgacaaaaccaccctccatttaattcgagcctttcttaaagctggagtaatggaagatggttgggttaagcctaataaactaggtgtaccacaaggcggccctctttcaccaattctatccaatatctatttagataaaatggataaagaattggaacaaagaggcctgcgctttgtccgctatgccgatgactgcaatatctttgtcaaaagcggtaaatcagccaaacgtgtgatgaattcaatttcatcatggctagaaagaaagctattcctaaaggtcaacgcaaccaaaaccaaagttgtacgaccaaccaagagcaactttcttggctttaccttctggaaaagtggcgaatactggcaagcaaagccaggagatgaccgcaaaatcaagctttatgacaagatgagagaacttctctgtcgcagaaaagcagctgctcagcctctatcactagtctttactaagataaatcaagtagttagaggctgggtcaattactttagagttggcgacatgaaatattttctaattaagttcagtcaatggctgcgtcataaagtacgggtggtaatcattaaacaatggaaactaccaaaacgaatatacattaacttaatgcggattaacaaggcactaaagtgcaattttagtgatgaagatattcataaagtagctaatacgcgcttaggttggtataaaagaagtacgggtcatgtcattaactttctgcttagcccaaaagtattgggcataagcaaagcggatcgcccaggcttggtcgatccgctagaatattatttatctcgtaaataatcacaaacgtagcgccggatacggaaccgtacgtccggtgcaatgagaggggcgagttataaaactccctctactctatttttgctttagctcttttttgttaagtatagcaattaagattaccgaagggtttaaatcatgaatcaatttattggtcgcaaaactgaattaagaaatctcgaaccgtcatatttctctttaatctcggtaagtgatacattaaaagcaaccaaagaaatctaacagattggaggaaatactgatggatgagttcgatcaaaatccaggtcgtcgtcatgtagttgatgcatctggtttaaatgtctttttaagtaaaatttatggctatatggcactggctgtctttgtttctgccttgagtgcctatcttacgatgactgtttttgctaggcagatggttgccttaatggttagtcatccgtggacgatgtggctgctattattgttaccaatcgcattaacctttgtcattaactttagagcaactcgaactccagtagccagctttattttattgataattacggcaattatttatggaattacttttgcctttattgcaggcgcttatacagggcaagatattgcttcggccttcgttgcttcggctagcgtattcgtggcaatggcaattatcgggacggtaactaaaaaggacttgagtagatggggttcgtatgcttcagctgcattaattggtttgattgtggcgatgttagttaatttgttcttaaagaacccaatggttagttacattttctcgtttattgcagtgattatttttacagttttaaccgcttgggatgcacaaagaatgaagaatatttacttacaatttggtggagaagtttcaaccaatggcttagcagttctgggtgccttgtagttatatctagattttgtcaacctgttcttacagttcctaactatttttggttataacgatgatcagaactaggtaattcaaaagcgtagtactagttaaatattcttggactattaaggagcatattcaatattacaaaaaagtgtctgggaaaaaactaagtctcagatcatgaaaaaagaacgttgaatttttgtttcaacgctctttttgtatacttttagctccagccttgatattattaaatcatcacaaaataaaaaaggtggaaactaacatgtacaagaattatatcacaggtcaaactgctttaacacttaatctagattttgccattccggccaatcatttggctaatgtcatcagctggtttgtagattcaattccagaagatgttttagtaggcaagactgctaaaacgggccgcccagcctatcatccagccatgatgctcaaaatactgctttttgcttactccagaagagttttttctggcagaaagattgagttgatgctggaagaaaatctgccaatgatgatcttggctgaccagcaaaagatttcatatcatactatcaataattttagatcaagcagccatgccaatgaactgattaaaaagagctttatctacttcactaacctgttagaagatgaaggcttaatcaatgaaggtgctgcttttatcgatggtactaagattgaagctgatgctaaccgctatacatttgtctggcgcaaagcggttgaaaagtatcatgaaaagctgaaaggccaggcagttgaactttatgatgaattgattactaaagaagtagtcaaagaaatggaaaaagaaaaagttcaaactagtcaggggctaaaggaattagctcaagaaactgaagcagaaattaacaagctgactaaagagattgagcaggaaaacaaagccattcctggcggttcacctcgaaaagccaagcgacgtggactaaaaaagattctgcaccggctaagaaaagattatgtgccaagaatgcaaaaatatgaagaagccgaagagatctttgccggacgcaacagttattccaaaacagatcatgacgccacctttatgcatatgaaggaagaccacatgaaaaatggtcaattaaagcctggctacaatattcaagcagtcacgaccgatcaatatgtagttgattatgccatctttcctaatccgacagatttcaaaactttggagccggttttggatcaaatgaccgtgttggacaagtttgacaaaatcgtcgccgatgctggctatggcagtgaatacaattattcgatgctggaggaaaaatatccagacaagaagtactttattccctacactatgtatgaaaaagaacagaccaaaaagtataagaatgatccaactaagctaatcaactggtactacaatgaaaaagatgattattacattgatcatcatggcgtcagattcaatttcaaatattacagccagcgcaaggatcgttctactggtcaggtccgtgattttaaggtttatgaggcagacgagttccagctaacgccagaattggaacaattggctaaaacagctagcggccgccagcgccaagttcgctataatcctaactggcaatatttaaaagaaaaagcaaaagaagttctccaaagcgaagaaggcagacacatctatggcatgagaaaatatgatgtagagccagttttcggacatttgaagaacgtatttggcatgcgcagaacgcacctgcgaggtaaagagaaggtcgaaaccgatatcggaattgcctttatgatgatgaatttgaacaaatattgtcaaagaaggtggctgaagggccgatttttattgttaaaaattttaaagagaacaaaaaaacgatcaagattcttaaaaaaggaaatcttgatcgtttttattcatctggaagctagttttttcccagacactttttgatttactttatttgtttatttagcgaaatcatttctaatagactctgagcagtagaggaaccttcattgccagcttttaagccggatcgttgcaaggcttgatcaatattctcagtggttaaaataccaaaagttattgggacttctgctttaagattcatctgcataattgcgtttgtaacattctgaataatcatgctgtaatgatcagtctcacctttaatgacagcgcctaaagtcataataccatcgtagttatttgaattgagaagcttattagcagtaaaaccaatttcaaaagcacctgggacccaatagatatcgatctgatcttcaagtactccaaattgttttaagctagcaatagcaccatcaactaaatgatgggtaacaatttcgttaaacttagatgcgacaattgcgatatgataattattgtttttaaaatttccttcgtaaatattcatttctgtgttccttactataatgctcctaataaatgatggaatttatctcgtttggtttctaaatagtcatgatttacctcattagcaggaatctccaggggaattcttttttcaatagtaataccgttattttctaattgatcaattttatcaggattattagtaagcaaattgatatgactaatacctagatcttttaaaatcttggcagcaataatataatttcgttcatctggcttaaaacctaaaatttcatttgcttcataagtgtcataaccttggtcctgtaaaccataagcttttaatttgttaattaatccaattccgcgtccttcttgtcgtaaataaagaattatgccactaccatttttattaatttgcttcatggcagtatgtaattgatcaccgcaatcgcagcgcattgagccaaacgtatcaccagtgaggcattctgaatgaagacgtactaaaactggctttttaggatcaatctttcctttaataatagctaagttttcattggcgaaagccttaattttgaaattgccatatttagtaggaaggtttacaaattctgagcgtttactcacaggactattaatatattcttgtagttctgcaattgttaaaaatggtaagtgatattctttagcaatttctttcagttggggacgacgagccatatggccatcagctttcataacttcacaaatatatgcaacttctggttcgccagcaagatgagctaaggcaatagaggcttctgtgtgaccattacgattcttgatttgatcatctttagcgactaatggaaaacagtgacctggtctaaagaagtcttctggcttggaagtaggatcagcaattgccttgatagttgccgcacgatcataagcagaaataccagtagtggtggttttgtaatcaacactgattgtaaaagctgtaccatatggatcagtattattttgttccatttggtagaaatttaaacgttgggcaattgttttgcttacaggggtgcaaagtaagccacgagcatgtttggtcataaagttaacattttcaggagtaactttagaccctaagccgatcatatcaccttcagattcacgatcttcatcatcagcaacaatcactaaaccaccatttttcatccattgaattgcattttgaattttttttacgtccattttaaattctcttttctaaatttttagcgacatatttacttaagatatcagtctcaatatttacttctgagccgacatttaacttacttaaatttgtttcatcttgtgtatgaggaattaatccaactgagaaaacattatcatgtgtatccattactgttagcgatacgccattaattgcaatactaccttgtgctacaatctgattttttaagcgagtaggaaaggcaaaccaaacttcaatagcattttcgttagtcctgatttccgtaactttggcaatatcatcaatatgtccagtaactagatgaccttctaatctttgtccgacctgtagtgaacgttcaacatttaattgggcattgatatccaaattcttaaaagtagttttctgataagtttgtggcatcatcgttactacaaaagaagtatcagtgtattgctcaacagttaaacaggttccattaactgcaattgaatcgccaatttgcaagtttttagtaaagtcgggctggcaagcaacagtcataacaatagtttcatcgtttttatcaatagcagcaattcgtgcgtcgccgcgtactagaccactaaacattaatttcaccttcaattctaaaattatcatccaacttttcagcacgtaaattatgtaaagttgttttggagctgggtgaaattcctagctttcctttttgaccaagtaaaattggacttatgtaagtaattaaattgtttacttgaccttcggctagcaaggcattagctagggtaggaccaccttcaacataaaccgactggatctcttcattggtcagtttttttatgacttcggtgattgaagcgtttttcatcaaaaaaattgagatattttcattatgtggagtcttagctaagcttgtattttgagtaaaaatccaagttggacttaacttatccgttaataacttaatatttaaatgattcagtaatctaccacgtcgatctactattattcgaatgggtggaaaatccgtagtgacagtagtcagtaaactaggattatcgataatggcagtatttgatccaatcatgatggcttgataatttgcgcgctctctatgtactcgctgataaacagtttcatttgttatttgagtgcgaatatttttagcctcattaattcgataatctaagctgaccgcctgtttcaacgttatccatggatgattatgttggtagaagtaagtataaaacttgtttagcttctttgcttgatcttctaatacgccaaccgttacttgaatattgtgttgccttaacttggcaatacctttacccgttactagttgatgtggatctacttgcgcaattaccactcgtttaattttgctagagacaattaaatcagagcagggtggctgcttaccataatgactgcatggttctagagtaacgtatagggttgaattaaataattgttctggagttagttttgaaatagcatcacgctcagcatgataataaccataacgaatatgatgacctgtagccaagatattgccatctttaacgatgacagctccaaccatggggttcttccatgtttgatagagtccttttttcgcttcttggatagctaattgcatatatgcttcatcactgttttccatttctttcacttcctaacagaacaaaaaaagaacctcgaagaattacctcgaggttctaactaacattcaaaaaataatttaagtacagttcctactatcaaaatagaaaagagcacagcaaaattattcttcttccatctagactctaactatcggtaccattaaaggattcaaccgcttatgcgggttgcggactttaccgccggtcgggaatttcaccctgcctcgaagaacattatttaattcattcttagaataaaaccgctttctaaatttgtcaataacttttttaattagaaaaattccaaaggtgataaaatacgctaaatctttttgaaattccttttagtgattattgagggttctataataaaatgaattaacaaaagcaactaatgaacacgagagtgataaaatgaataccaacaaattaactgaattacttaataagatgaatgagtatcgtcccttagatcaagcacaggtaaaggctctagaacaagtcaaaaaagagacaaatttataggatacgcgtggtgctagttaaatcgttttagttaataaaaaagtccaattagactagactcaagttgtaagtaatttaaatagaaaagagtctgatctaattgaactatctcaagcttaagcgtttttctcaccatttacaagttagttttaatcggttaaatgtgatttgtcgctcgctgtataagctttatgcgcctgatggacttaaacatcgtaaaaatgttgatcagaccaagcttcctaatagttctatcttagcgatgctcatttggcaaactgaaattggaattgaatctcaacgaagattctgtaaattcttcgttggcttatctcattctcgttttaaccgtcgagctcgaatgctcttgcctctaattcgttgtatccgtcaggcttggaatcaagaagtaaagacagctggagaatttttgattattgatagtttcccagtgccagtttgccagcctgttcgcaattatcgtgtcaagatctttcggggcgtagctgatattggttataaagcaaccaagaaagtctattattatggcttcaaggtccacgcaatagtaagcgatgatggctatctgcttgactatgcagttactaaagcgtcagtacatgatgccaaagagacagtagaattgatgatcaatgctcatccagccaaccattatcttttaggagatgaaggttatttaagcaaaaatctagctactaatctaaagcacatgggatatgtgctttggacgccatatcgtaaaaatatgcaaggagctagaaggcataatgatcatcaattgatggcaattagaagaagcattgaaagcgacttttctttgcttagttattacaacgctgagaataatcgagcaagaagtccagtaggctttcaacagcggctagaaatagctattttagcttataatatggcatattgtctagaacgatttaactagcaccacgcgtataggatatttattgaaaaatcaatttaattagaaaaaactctaaaatgaagaaaatttcatttgatctacattaaatcttggtttttaaaggttccttttttcgtaaactaagtgtacaaagttaattaatacgaaaagcgaggaattcaattatgaaaaagtttaacattaaaaaagtatcattggcagcagctgcattaggcttagcagcgggtggcgcaagtttattggcgattaaccaggctaatgcttctactggcactcaaacgcaacagagtcaaagcaataacacagaacaaaatcaaagtaatacaggtactgcaagtattaatctttctcaagaagatgcagttaataagttttatgaaaagtatggctcaaaatcaattaaggagattgaactagagcaaaagaagaattcatatgtgtatgaaattgaaggttttgattcacaaaatgaatacaaagttaagattgatgcaagtaatggcaatattttaaaagctgaatctgaaaaattagattcagatgatgaggcgcaagcattagatcttaataatatgatgactcgagagcaagctactcaattggctcaaactcaggtatcaggtcaacctgttgaatggtcattagaaatggatgatgatcagccaatctggaaagtagaatttgaagatggaggtaagaaaaccgaagttgaaattgatgctaaaaatcagaagattataaagactgagactgaagatgatgaaaaagatcatgacaaggattatgaaaaagaaaaaaatgacagtcaagagcaccaaaatactgatgaagattaataagtaactaatagttagaaccgtttgttttaagcaagcggttctttttcataaatgaaattactatacgttttttgaatagtagcatttaatattagtaattttatagacagtctgttttgattagactatgtatataaagtaaacgatagtaaggagaaataatatgaaagcagcagtttttgtagaaccaggtaaagttgaagtaagagaagttccaaagccaaaaatcgatggtgaaaatcaagcaattattcgtgttatacgtgcaagtgtttgtggttcagacttatggtggtttagaggaattgctgatcgtgaaagtgggtctttaattggccatgaggcaattggtgtcgttgaagaagttagtgatgaggtaactaatattaaaccaaatgattttgttctcgtaccatttactcatgaaactgtcaaatcttttgtgtaaatagttctttctcgtaaattgattttttaatcatttatttaatcaaaataggattctaaggtatcctgaacctgaccaaagcctttatgaattcggttgaaatagcggtcattgtagctcattgcctggatgccaataaatgcatcaagcgactgttcagttggaaattctgccttaggcttagctttacgcttgatgacgttgttaaaggattcaatcatattggttgaataaattgaagctctgatttgtttgggataattgtagaagaccagcagatcgggctcaatttccttcaaacctttgatgacattgctataagctttattccatctggcatagaatttgtgcaagacagctgcagcttcttttttgcttgtctgttgatgtatctgcttgaattcgttcatgatcttttcgcggtcatccacccggactttagcacagatattgcgcatgacatgaaccaggcagcgttgaaaatgagctttaggataagtcctggccaaggctgttttcatgccaacaacaccatcagaaagaaagagttcaacttgcttcaagcctctggacttcatgttttgaagcatctctgtccagacttcaatgttctcactaggagcaatgcagtagtcaatgacttccttatgtccattaggtttaatgccaatggcaatatatactgcttcacgctcaaacgtttctcggcgcaaaggaaggtatgtcgcatccaaatagacacagaaaaacttgtcgcttagcttgcgcttgtgataagcctcaaccttggggagcatctgcttggaaatatttgatacttgagctggactataatgactgccatacattttctcaatcaagtcagcgatttctctggtagttacgcctttggagtagagcttgataatcgtgctttccaaaacatcagagtgctgcttgtagtcaggcagcgtgtgctgatgaaactgaccgttgcggtctcgaggcacttgcacttcaattggtccaaactgggtatcaaccttgcggaaataagcaccatttctagaattgccagtattccagccatttctggcatagggatcatagcctagaaaggcagttaactcagcttctagcaagttattaacagcctgttgtagctctttgcgcaataaatcatttattttgtctggattgaatagagcttgagcaaaatctttggtaaaatcattcatgaaggagttcttctttctgtatgtgtttttttgttcaaaccaatcatacgagaaaggaactcctttttctaatgtttaaagaaataaatttaaggaattattcatccttacacaaactattttacagtctcataatttgcatacgcactaaccgtttttaaaaatgtgtttgtaagattctctttaaattctaaattctttgtttctctcacttaagtcaccttgccaatctattttatctacaattatactctttcgcacacaaaaaaacggtcgattttattttcgaccgtttttacgcacgctttgcgcgattatttatttttcgttcacgataatcaatgacttaattgcttcacgattgctcattgcttcgtatgcttcttggatatgatctaaatcaaaactcttagtaaatacttttcctgggttaatttttccatcaagaacagcttgtaaaagaacttctttatcaggcttagttactgaagcaataccaccgcgaagaccgacatttttccagaataattggtttgacttaggctctgcatgtggtacacctactctaccgattaccgcacctggacgagcaatttgaccagcttgttcaattgcactttcagcacctacacactctaagaatgcatcagcaccagcattttccttagttaaagccagtacatctttaactgcttgatcatcacgacttgaaacaatgtcagttgcaccaaattcttttcctaattgtgcacgatcatcgtggtgggataaaagaatgattttttcagcgcccaacaacttagcaccaataacaccggcaagaccaacggcaccatcaccgataactgcaacagtatcgcccttcttaacttcagcgtttaatgctgcgtggtaaccagttgccataacatctgacaatgtttgaagggatgccaattgatcatcagtataatctcctggcttaccgggaatcttaactaatccagagtttgctggttcatatttcataaattcggcttgatagccaccgttagtacccggcttcaaattcaagcaattgccttcaaaaccattaatacatgcaacacaatgaccatatcccaaattatggtacaggagaagttaaatttggtataaaggatgatggaacaatgaaactgtcaaatcttttgtgtaaatagatctttctcgtaaattgattttttaattatttatttaatcaaagtaggattctaaggtgtcctgaacctgaccaaagcctttatgaattcgattgaaataacggtcattgtagctcattgcctgaatgccaataaaagcatcaagcgactgttcagttggaaactctgccttaggcttagctttgcgcttgatcacattgttaaatgattcaatcatgttagtcgaataaattgaagctctgatctgcttgggatagttataaaagaccagcagatctggttctatgtctttcaagcttctgataacatggctgtaaaccttgccccatttggtatagaagtcatgcaggacagctgtggcttcttctttgtttgtctgttgatgcacctgtttgaattcgttcatgatcttttcacgatcgtcgacgcgtactttagcgcagatattgcgcatgacatgaaccaaacagcgttgaaaatgagctttaggataagtcctggccaaggctgttttcatgccaacaacaccatcagaaagaaaaagctcaacttgctttaagcctcgggatttcatgttttgaagcatatctgtccagacttcaatgttctcgctaggtgcaatgcagtagtcaatgacctccttgtgcccattaggcttgatgccaatggcaatatagactgcttcacgctcaaatgtttctcggcgcaaaggaaggtatgtcgcatccaaatagacgcagaaaaacttgtcgcttagcttgcgtttgtggtaagcctcaacctttggaatcatctgcttggaaatatttgatacctgagctggactgtaatggctgccatacatcttttcaattagatcggctatttccctggtggtcacgcccttggagtaaagcttgataatcatgctttccaagatatccgagtgctgcttgtagccaggcagcgtgtgctgatgaaattgaccgttgcgatcccgaggcacttgcacttcaattgggccaaattgcgtatcaactttgcggaaataagcaccatttctagagttgccagtattccagccatttctggcatagggatcatagcccagaaaggcagtcaattcagcttctaacaagttattaacagcctgttgtagctctttgcgcaataaatcatttattttgtctggattgaatagagcttgagcaaaatctttggtaaaatcattcatgaaggagttcttctttctgtatgtgtttttttgttcaaaccaatcatacgagaaaggaactcctttttctaatgtttaaagaaataaatttaaggaatcattcatccttacacaaactattttacagtctcggaacaattattggtgtaaaaaatccaattgatttttgtttaaatgtagagaataaaataaatgattccatccagccacatccagattataatttagagattgatgataaaactaatgtagtcacgttgacggtaaaacagggcgataatccaccatatttatataaagcaaaagcttataaaagaaatgatagtgcttcaattgaagtggatagaacagaattatcacaactaattttgattggcgaaaataagacttatgacagtttaacagctgcaaatcaaaatctatcgtttaatattttagaaatggcactaaaagaaaaactaggaattaataaattgacatccgatgtgctaattactcttaatctagaacagaagaatgccggatatactaatgcgggtgaattattagcagataaaaatcattatcgtgggattgatgtcgttcgctttggtgaaaatattaatattatgctggatagggcaaactatgagaatgaatcaattcttaaagagtatgaccaaactattcaaaaatatcggcagtattatcagcgtgaggaaatacatggtgttactcgtaacgttataagtcaaattcctgaagaagcttttcgtgaagcaatagctaatgccttggttcataggacttggaatattaatgctcaaattaaagtttctatgtttgataatcgaatagaagtagtttctccaggaggattacctcataacttgagtaaagatgagtatctgtcaggtcaaatttctattttaagaaatcctattgtggctaatgtcttttttagattgggtttaattgaacaatttggtacaggaataaagagaattaaagattcctatcaaggaagtttagttcaaccacagttcgagatctttgaaaattcaataaaaataattttaccaattctaaaatttattactgatgatttaagcgatgatgaaaagaaagtatttagaaccattcgcgagggtgcaaatacttctacacaaattagtcgagcaagtaattttggtaaaacaaaagttttaaatctacttaaacaactaacaaagcaaggttatgttgagagaattggtgagggtagatctacaaaatatgttttaaataaataatcgcgcgcaaaacgtgcgtaaaaatggtcgaaaagcaaatcgaccgtttttttattgcttagttaaaatctcgtaactccaattaatcagtttgttattataagcaattgctatatttttatctcctgatttgattaatttaattaattttagattctcttcagaaatagaattaacatcgacttcattacagatccattcacctaaagttaaatagattgatttaaagttattgataagcaaaggataaacataattcttggaggccaaggctaaactatgtacataagcaaatatttcttgtgcagcgtccttggaattggtggctttggcaagattttgcatatttgaaatagctgattgcaggcattgttcatcctgttctatacaatctaagcgaacaacatcattttcaattagtttcctgatttcaaaaatcgaatttaaaagtgaaattcggtaatgtcccccgtagaaattaataatttcgttcattgtttgcaaatcgccatcgacacgataatctgctacaaaagccccatatctaggacgaatttctataaaatgtaatgccgctaatttttttaatccggaattgatcacagttcgacttacttgaagttgttcttgtaaaactctttcactgggtaatttatcgccgaggttaaactttcctgttaagattgctgtttttaattgattaacgaagaataaatctgttgcagtgggtacatttattgggtgaaatttcatattattctcctttgcactggtaggaccagaagccaacggctagtttatataaaataactttgtttttctttactttgatcctttttttaattcatattaattataatgaaaacgtaatcatttgaaaacgaaagggttaaaaaatggctgaaaaatatgatgttatcgtagttggggctggcaatggcggcttaatggccgccgcaagttctgctagaatgggcaaaaaaactctattgattgaaagacataatctggctggtggagcagcaaccagttttattcgcggcagatttgagtttgaagtagccttgcatgaattatgtgaatatggtcatgctgataatccgcgtgcagtacgaaaaatgtatgactggttaggtgccaacgtaaaaatgcaagaattaccagatacttatcgctatattatttatggtaaagacggatttgatgttaagatgccagctggtagagaaaattttattaatgcgatggaaaaatatgtaccaggtacttcagaaaagatggaaaagctttttgatctgtgtgagcaaagtatgaatgcgttagcagaaatagcagatggaaaggataaaaaagaagttataaaaaaatatccagcttttatcgagtatgctactaagagttgggatgatgtgcttaacaaattaaaacttcctaaaaaagctcaacaaattcttggagcatattggtgttacattgatattcccactgatgaatttgaatttccgtattttgccactatgttagctacttatgtagaaaacgatgcctatattcctcaaagaagaagtcatgatatgtcaacagcattggcacaagtaatttatgataatggtggtgatgtttggctgagtacaactgtagaaaaaatcttagttgaaaatggtcaagctgttggtgtgcaaattaaaggtgaaaaagtttttgctaaggaagttatttgtggaattactcctcacgcagtttatggcaacatgatggatcaaaagtgtattcctgagtatgctttaaaatatgcaaactcacataaattaggaaccagtgcctttttggtgtatcttgggctaaataaatcctgtcgagaacttggaataaatgactatagtgtgttcattgctttaacaggtgatactagaaaacaatatgaaaattgtaaaactatggataaaaatgattttatgatcatgaattgcttaaatactgtcattccaaatgcttctcctaagggaactagtgtttgctacattactaaattagttgatgatggtgtttgggataatgttaaacccaaagattatgaaaaacttaaagttaaaatagctaaaaatgctattgatgagtatgaacaggcaacaggtattaaaattagtgattctatagaagagattgcaattgctgcaccaccaacatttgctcgctatatgggaacacctgatggtgaaatttatggctatcattgtgcaccatgggatcaaattattggtagatcaatggatttaaagaacgttgtaaatccactgccacatttatatttctgcgggggtcatggatttatgtgtgatggttacaatgtttcatacactactggtttaactgcagcaaaaatagctgttagtgatattaataatatgggagcagatcatgaataaatttgaagagattaagggaattattgatttaaagaagcttcaaaatgagcgaaaacatgaaattcaaaatgcttcggatgcagagttgcctaaaaaatatccgatgaacattcttgaagaggagcttcatcctgaaacgcaatatttgaaaatcactaagattattgaccgtgacgatgctaagagctttgtatttgtaccagatgaatcaaaaggtaccagcaaacttgcatatttccaagcaggtcaatatatttctttaaaacttcatattggtaaaagttattgtacacgtgcttatgccatttcaagcacacctaagcaggcgctttctggcgaatatatgctcacaattaagttagtcaaaaatgggtatgtaactccttatatttgggagaattggaaggttggcactgaagtagctgcttcgggtcctgctggtcaattattctatgaaccattaagagacaagaagaccattattgctggtggcagcggtattacaccattttactcaatggctggtgcaattgctgatggcacaattgatgcaaatttgattattttatatggaagtagaacgcacaaccatattttgttgggtgatgaattagatagaattgctgccaaaactgataaggtcaaggtcgttaacatattaagtgatgaagaagtagtcatgtggtaataagtcaatgtaaaagttaaattttatttttaattagtttgttttaaaaccaaaatttgcgtgcatgaaactaagccctatttcaagggattttttaacaactattatttactcctccaaaaatgttttagaccaattaatcacctcggtgtttgatagatttgaccatttttgagcagagtgaaaatggtcctggttaattttcttgcacaaagaacgcaagcgcgtttatgcggagaatagaaagcttcatcgtatttcttttgatagtacttccgaaaaacgggatctctttgtctaatcaggttggcagcttcaaccaaataatatcttagataatgatttccgtttttagtcatcggtttgtgttcgctatcaaaattactagattgcttttgacgccaagctagaccagcgtatttagctagctgtgcttcagtgtcaaagcgatcaatactgccgatttcagcgataataccagcggaataaactgacccaattcctggaatagattgtagtattctctcttcaggaagcgtttggacgatatctgtaattgctttatctaagttcttaatcaatttctgattagttttaatttcggcatagtaaacagataatacggcatcaatcgagtctttcatgactttacctaagcgatatgatcctctaacggcttttctgatcgctttagctaaagtctctggatcagagaagcggccacgtcctttggtttgaaggtagtcaattagatcctcgattggcatttcagcgatttcatcgatggttttactatcagtaacaattgacagcatcgttgcgccaaagatagaagttttaatattgtctttgtcaacggtaactagtttgtttacacgataataaagagtttcaatgaagtgctgcttagctctagtgagcgaagatgtgatttcatatctagctctagttaaacgctgtaaagctaagtattcctcttgccgagcaatagtgacatggtatttaccaaagcgtaagtattcagcgatgtaataggcatcagtaggatcattcttattttcttcgtaaacgtcatgaaatcgtttagtgtttttaggattaatgacatcagtttcaagattaattttttgtaaatcttcgtcattggcaaagaaataagcagggtgaaagctatagattgaagtggcttccatgccgataattactttgtcatagctgttctgtttagcaagttgaagaattatctttttgacctcattagcaccaatcaggtcattagaaaaagattggttaagtaaaggtttttgataattttctgagtcagtaatagcgacttgaagatcttttgaactaacgtcaattccgataaaaagtttcattgagaatggcctcctttctagcaaatatttggtcatagatcgatcatcacatgttagtccctaattacagattctaagacaatctcgcaaaatataagtattcataggttcaagctaaaaagctgcgactgaatctgctctgaatcagtaatagccagaatcgatacagcatgtgagtaagtcattagtaaaactgcttgggcggcagactaaaaaagtagtcaaagctacagaaggaaacaacctataccaattgaccaaggtcaatgacaattagagactagcatctgatgatcgaataaacaaactaaaagaataatcattatcactgatttaatttatataatacgatttaatttatataatacgagaaggatatgaacatggctttatcaatcaggccatcattgaaaaatatgctccagcagataagaattattctatttatatgagtggtccagctgcgatgattcattttgtaaatcaagaaattaaaaagttagatcttcgtccagggcaagtaagacaagaaatgtccggttcagtaaatccatactttttcaagaattatcctgaggaagcaaagaataagactttcaacatgacagttaaaacccgtgatcaaatacaagttattccagcaagaagtgatgaaagtttgctggtggcaatggaaagagcaggtattattgccccttcatcatgtcgctcaggcgtttgtggtgcatgtcgttcaagagtagttaatggaaaagtatttattccatttcctggacgtcgtgcagccgatagtgaatacaactatgtcaacacttgtgttacatttctaatttctgatttaacacttcaagtgccagttcatgactacgcgagactgtaaaatagtttgtgtaaggatgaatgattccttaaatttgtttctttaaacattagaaaaaggagttcctttctcgtatgattggtttgaacaaaaaaacacatacagaaagaagaactccttcatgaatgattttaccaaagattttgctcaagctctattcaatccagacaaaataaatgatttattgcgcaaagagctacaacaggctgttaataacttgctagaagctgagttgactgcctttctaggctatgatccctatgccagaaatggctggaatactggcaattctagaaatggtgcttatttccgcaaggttgatacccagtttggaccaattgaagtgcaagtgcctcgagaccgcaacggtcagtttcatcagcacacgctgcctgactacaagcagcactctgatgttttggaaagcacgattatcaagctctactccaaaggcgtaactaccagagaaatcgctgacttgattgagaaaatgtatggcagtcattatagtccagctcaagtatcaaatatttccaagcagatgctccccaaggttgaggcttatcacaagcgcaagctaagcgacaagtttttctgtgtctatttggatgcgacataccttcctttgcgccgagaaacgtttgagcgtgaagcagtctatattgccattggcatcaagcctaatgggcacaaggaggtcattgactactgcattgcacctagcgagaacattgaagtctggacagatatgcttcaaaacatgaaatcccgaggcttaaagcaagttgagctttttctttctgatggtgttgttggcatgaaaacagccttggccaggacttatcctaaagctcattttcaacgctgcttggttcatgtcatgcgcaatatctgtgctaaagtccgggtggatgaccgcgaaaagatcatgaacgaattcaagcagatacatcaacagacaagcaaaaaagaagctgcagctgtcttgcacaaattctatgccagatggaataaagcttatagcaatgtcatcaaaggtttgaaggaaattgagcccgatctgctggtcttctacaattatcccaaacaaatcagagcttcaatttattcaaccaatatgattgaatcctttaacaacgtcatcaagcgtaaagctaagcctaaggcagaatttccaactgaacagtcgcttgatgcatttattggcatccaggcaatgagctacaatgaccgctatttcaaccgaattcataaaggctttggtcaggttcaggataccttagaatcttattttgaataaataattaaaaaatcaatttgcgagaaagaactatttacacaaaagatttgacagtttcgactacgcaaacatgttaggttaaaagtcaagactgaaaataaaattttttttgcgttatattatctatatgttgtatttgatagttaagcagcaataccaaatgtagaaaaagaggatttaaatggcaactttagagatcaaggatttacatgtagaagttgaagacaaagataaaaaaacgagtaaaaagattcttaaaggcgtgaacctaactctcaagacaggtgaaattcatgcaattatgggacctaatggaacaggaaaatcaactttatctgagactatcatggggaatcctcgctatcacataacgcaaggcgatattttgctaaacggtgaaagcattattaacatgccagttgatgaacgcgctagaaaaggattatttttagctatgcagtatccagcagaagttcctggcgtgactaatgctgaatttttgcgggtagcaattaatgctcgccgaccaaaagatgatccgatttcagtgatgacttttttgaatgaattagataaaaatctggatttgctagatatgaaggaagccatgaccgagcgttatctgaatgagggcttttctggcggtgaaaagaaacgtaacgaaattttgcagatgttaatgattaaaccaagttttggcattcttgatgaaatcgactcaggtctagatattgatgccttaagagttgtatcacggggagttaatgccatgcgcggtgacaactttggtgctttaatgattacacactaccagcgtttgcttgattatattgtgcctgacgtggttcatgtcatgatggatggacgtattgttaaagacggtggaccagatttagctaaaaaacttgaaaaagaaggatatgcaggtcttcgcgatgaacttgggttacatattaagttagttgatgaaaattaggggggaaaacgtcaaatgttgagcaaagaaaacatacttgtctcatcaaaggaaaacaacgagccttcctggttaactgatttaaggactagttcttttgaaaagatgcataaactttcttatcccaaaatgcagcgtttttcctatcaagattggccgttgattgctaaagaagattttaagtggcaaaaccaacctgacttttttataaaaaaagagaatcatgatcttcttaacgataagggaatcatcttatgcgatctttttacagcaataaagcaatatccagatttagttaaatccgcattagcttccgttattaaaaatgatgaagataaattaacggcttatcattatgcgtatttaaattcaggcttatttctttatattcctaaaaatacagttttagccgaaccaattacagttactttgaaccctacgcaagatccatatatttcacatttattgattgttacggaggataacagtcaagtgaaattcttggaagaaattcaaaatgaggataaagcagttaaatccgcaaacttaatggtggaaatcgttgcacatccaggtagtcatgttgaattttcatcccttgatgaaatggataaggatacaacgctttactttaatcgccgtgcaagaattgaaaatgatgcacatgttgaatgggcaattgcttttatgaatgactgcaacaccttaggcgatttggattcagaattaattggcgaaggcagttatgcggattctaaggcaattgcagttacaactggtgatcaaagagtcggtattaacaaccgagtaaccaaccgcgggccacattcaactggtttgataaatcaacgtggtgttttacttgaaaattctcaactaatttttaatggaattggtcagattgttcatggtgcacatggctctaaggctgatcaacaaaatagagttttaatgatgtctgataatgcacatggagatgccaacccactgcttttaattgatgaaaatgatgttattgctgctcatgcggctagtgtgggtcctgttgatcaaattcaaatgaattatttaatgagtcgtggtattccatatgatcaagctcaaagattggtaattcgcgggttcttaggggctgttcttgatgcaattcctaataaggaagttcggcaaaagatgattgatattttggaaaaaaaattaattgatggacaaactagacgttaagaaaattaaagcagattttccaattcttaatcaaaaaattaatgatgaaaaattgatctatcttgataatgcagcaactagtcaaatgccgttagttgtagaaaaacagattgaacattttactaattttgatcgcgctaatgttcaccgcggtgttcatactttagggctaagggctacacaaaaatatgaaaatgcccgtcaaaaagtagctgactttattggtgccaaaaatgcaagtgaaattgtatttactagtggttgcacagatagtttgaacttagttgcggcaacttatggtgagcaaaatatccaagctggggatgaaattgttgtttcaattatggaacatcatagcaattttttgccttggcagcagattgctttaagaaagaacgctaagttaaagtttattgaaattgatgctaatggtcgtttagatctggaagatgcaaaaagtaaaattactacaaaaactaaaattgtagcgattactcatgtaagcaatgttttggggacaattaatcctattgcggctttaacaagcttagctcataaaaatggcgcgattgttgtagtagatggcgctcaagccgtcggacactttccggttaatgtgactgatttagatgctgacttttatgcattttcaggacataaaatgtttgcgccaactggagtaggtgtgctttatggcaaaaaagctctgttagaacaaatgccgccttatcgttttggtggtgaaatgattacaaatgtaactagaaaaggagctacctgggcacctgtgcctcaaaagtttgaagcaggaactccgaatatttctggcgtgatcggcgtaggtgccgcaatagattatttaggaaagttagatttaactttaattcaaaaacatgaggatagtttaacagcatatgctttaaaagaattatcaaaaatagatgacttagtggtgtatggtccaaaagactgcagtaatcgtactggtgtgatttcttttaatttaagaaaaattcatccacatgatttagcaacagcacttgatttaaatggtgtagaagttagagcagggcatcattgcgcacaaccattgatggaaagccttaagacagaatcaactgtacgtgctagtttctcaatctataatacaaaaaatgatattgatcaattggttagttcaattcaagaagcaaaggagtttttcggtgagcttagataaattaaaaagtttgtataaagcagttattctcgatcatgctcaaactccacgcaattttggacaacttgctaattatactaatgaaacgactgtttataatccaacttgtggtgataagattcacttaactattttggttgagaatgatcaaattaaagatattgcttttgatggggaaggatgcactattagtaaggcttcagctagtatgatgacccaattggtaaaaggaaaaaatattgaacaggctattagtttttctaggatattttcagacttagcagctggcaaaaaacgtagtgaacaagacatgcaaaaactagaagacgctcaagtcttgataagtattatggaattcccggcgcggattaaatgtgccaccttggcttggtggggattagatcgagcattacttggtaaagaaaacgaggatgaggataatgactaaagcagaagaaatagttaaagatgaagattatcaattcggctttcatgataatgtaaaaccaaaattttcaacgggacatggtttaacagaagatgtaattagacaaatttcggctgaaaagcatgagcccaagtggatgttagattatcgattaaaggccttccatatttatgaaaaaatgccaatgcctagttttggtcctgatctttcgggtttagacttagatgatatgctttattatcaaaaaatgactgataaaaaatatcgtgattggaatgatgtaccacaggatattaaggatacttttgaacgcttaggtgtaccacaagcagaaagaaaatatttagctggttcagctgcccagtatgaatctgagatggtttatcacaagatgaaagagcaatttgataaattagggattatctttacagatactgatactgcattgcaggaatatccagatttattaaaaaaatattttggcaaattagttccaattgatttaaataagttttctgccttaaactgtgctgtttggtcaggtggcacttttatttatgtacctaagggagttcaagtccctgcacctgttcaagcttactttagattaaatgcggaaaattctggtcaattcgaaagaactttgattatcgttgatcaagatgcacaccttgattatgttgagggatgtactgcaccacaatattcatctgactctcttcatgcggctgtggttgaagtaaatgtgttggacaatgcatattgccgttatacaactatccaaaactggtctgataatgtttatagtttggaaactaaaagagccgttgctggcaagcatgctacgatggaatgggttgacggaaatttaggtgccaaggtgaccatgaaatatccgagcgtttatctaaatggtgaaggagcacgtggtaccatgctttcgattgcagtggcacaccacgggattcatcaagattctggagcagggatgtttcataatgcccctaacacttctagctcaattgtttctaagtcaattgccaaaggcggtggctcaactgattatcgaggaagtgttaagttttctaaaaagtcggacggttctaaggcgcatgttgaatgtgacacgattattatggatgatcaatcatcttcagataccatcccaactaatgcgattgaaaactcaaatgtggcgatggaacatgaggcaacagtttctaaaatttctgaagatcaattgtattatttggaaagtcgcggtatttcagaaagaaaagccactgaaatgattattatgggatttgttgaaccgttcaccaagcagctgccaatggaatacgctgttgagcttaatcgattgatcagcttccaaatggaaggagcaattggttaatgttagaaatagaaaatttatctgatcaagaaaaagatgtttaccaggcattaaaagatgtaattgatccagaattgcaagttgatattgttgacttaggcttgatttatggcattgaggtaaatgatcatctttgccagattacgatgacactaactattatgggatgtcctgtgagtgaatggctgaataacgaaattaccaaggcagcagagagcgttgcggaaatcgatgattgtcaaattaaactggtctggtatccgcaatggaatccaaatatgatgtcgcgtattgctcgaatgacactaggaatccatggataggagcaccattgatggaaaatcatagttttatttcatatgctaatggtaaatcgctagctgagattaatagtacgattgcggttcctaaaactaagaatttctttagaatgctttttgcttatacgggacctggcgcattagttgctgtaggttatatggacccaggcaattgggctgcttcaatcaatggtggacagagctttaactttttactgatttctactattttaatttccagtttaatggccatgctgttgcaatatatgtcggctaaattaggaattgttacgcaaatggatttagcgcaggcaattcgtgctagaactagtaagagattgagctttattctttggattgtaattgaattagcaattatggcaacagatgtggcggaagttattggtgcagctattgccttaaaccttttatttaaaattccactagttatagcaacatttatcactatttttgatgtgtttctactattattattgtcaaaggttggtttcagaaaaatagaggctttgatttcatgtttgattatggtgattttatttgtttttgcctatcaagtcatgttagcagagcccaattggagtaagatcttcttgtctgtttttccgagtcccgaactagttgcacaacatcccgtggttaatgggctttccccgttaacaggtagtttaggtattattggtgccactgtgatgccgcataacttttatttgcattcttcaatttgccaaacaagaaagataaatcatcatgatccagatgatgtcaaaaatgcagttcgttttactacttgggattcaaatattcaacttattctagcattctttgttaacgtgcttttgctaattatgggagcagctgtttttaaaagtggagcggttaaagatagttcattttttggactttatgatgctttaagcaatactgcaatgctaagtaatccaattttgatttcagtagctaaaactggaattttatcagttctctttgccatagcacttcttgcttcaggacaaaattctactattacagggactttaactggtcagattgtaatggaaggcttcattcacttgaagatgccactttgggcgagacgattatttactcggctattatccgtaattccagttatcatttgcgttgttatgacagctaacgacacaatttctcagcagcactttgctctcaacatgcttttagaaaattcacaagtcttcttagcttttgctgtcccattttcgattgttccattattaattatgactgatgataaaagaatgatggggcaattcaaaaataggagaagctggtcggtcttaggctggatcagctcgattattttaattttcttgaacttatataatttgccggcaacctttgtttcatttaatataatgcctaagcaagatgccaagattttcgcttatgctattattgtactgattattttattgctggcttggacctgctgggatatggaaaaaagcaaaattagacattaaaagcatttcataataggagaagcaatgtaataaatagtttagatttcattttagcaagtgtaatagcttactttttattatgtaattagatctaaaataaaatcaaaaaatctgaagaaatttaaaatggaggaaaaactatagaagccaaaaatctatttgatactaactttggtaaagttccccaaatatatttagggagaaacaaagtagtcgaaaatgtagttgaatcatttgaagatgttatcaaatatcgattatttacgggatgcgtggagtaggaaaaatttctttattgtctgatattacatcaaatttaactaaaaaaataattcccggatttaaaattgaagtgcaacactaagtgttaaacaaaaaggccatgaagacctaaacttgaagtgacgaaaaatcaagaaaggaagatctttatgaccaattcaaattctagcatttctaagcactatcatcaattaaccagcgtacaacgtggacaaattcaagcaatgctggattccggcataacttcccgtactgttatcgctcaagaagtcggctgccataagtcgacaatcagtcgcgaaatcaaacgcggaagtgtcctgcaaagagacagcagctatttattgtatgagcactattacgctgatactgcacagatttattatgagaagcgtcgcaaaaactgctatcagcgcaatccattgaagcattatgctgtctttttgagaatgctctccagacgctttaaagctaaatttgatgccaccagcatcgatgagttcgttggtgaattcaaaaggactatgccaggctacccttgtcccagcacaccaactgtctatcgctatattgatcagggcttgctggacataagcaatattgatctgcctatgaagctcaaaagacgcaggaacaagcgtcatcacagccatggcggtcacgctttgcacaagaagcatcttggcaattccattgaacagcgtcctaaagagattgaagacagaaaagctccgctgcactgggaaggagatctggttaaaggcgtcagacgcaagaatcagcctgctttaatgactttgactgaaagaaccacacgctttgaagtagttatcaagattcctgactatcgggcaagcacatgaaagacaagtcaaaagcttatgttcaacaggcaaccaatgccattaaccacaaatatcgccgaatcctccaatatcagacagcagaagaactcttcaagcaatatatctcttcataacctaactgttgcacttaatttgacaattcaggaagaattaattatcatatttcccgcaaaaaagttgttgtgcaaaattatcctatcaaagaaacgggagctacctacttgctaaagccatatgagctactagtagaagaaacttataattagacctttgagtcaccaagcgtattagtgcttcggtggctttttacttgtgtgtcgggcatgacatttcatctaatccaatgaaagtttggaccacgggtatttgtcgccaagtgtagtgaaccacaagccgatagcggtgacgctatgggtgaaggaagtggctagcgagttttccgagcctacgtacagaaacctggttaggccaaatggcggataaggctgcgatacaagtcgaagtccaaaagacaaacgtaaagtcaagacggtaaaccaggaggcagtggaaaatcaaagatgaatgtcttaccccgagagatcttgcggacaggcaagctgagcaagctttaacatcagcgatcgtaagcctggtcgaaaaaggttagtcgcaagaagtcagctgaggtcatagtagtgttgaaagtcttgtaatgagactggagcgaaggacctaatgtttgtaagagcatatcccgctataagcaatgttcagatagtccgaataagaggatagcctagcacaaagagaacgtaactctttgatggtgaaagcaattgggatgattctgaataaatttacaagtagaaatggagatattacgagatgaaattaattgaacagattctaagtcagagcaatcttaaagaagcgattcatagagtcaagattaataaaggtgctccgggagtagataaaagaatggttgaagaacttgatagctatttcagaaagcatcaagcagaaattaaatacgcaatcatgaagatgatggatatcaatgggtaattgatttagatattgagaaatattttgacacggtcaatcatgataaattaatttcaataattagagaacgagtaaatgacaaaaccaccctccatttgattcggtcattcttaaaatccggtatcatggaagatggtttggttaagcccaataagattggcgtgcctcaaggcggaccgctttcgccaatcctgtccaagctttataacaagattagagagcttctttgtcgcaggaaagcagctgctcaacctctatcgttagtctttactaaggtaaatcaagtggtcagaggttggattaactactttaaaattggcggtatgaaatactttctatttaaattcagtcaatggctgcgccataagatacgggtagtaatcattaaacaatggaaactgccaagaagaatatacactaatttaatgcggattaacaaggcattaaagtgcaattttagcgacgaagatattcataaagtagctaatacgcgattaggttggtataaacgcagtaccggacatgttgttaactttttgcttagcccaaaagtattgggcataagcaaagcggatcgcccaggcttggtcgatccgctagaatactatttatctcgtagatgattacaaacgtagcgccggatacggaaccgtacgtccggtgcaatgagaggggcgagaattaatctccctctactctattactttatttgtttatttagcgaaatcatttctaatagactctgagcagtagaggaaccttcattgccagcttttaagccggatcgttgcaaggcttgatcaatattctcagtggttaaaataccaaaagttattgggacttctgctttaagattcatctgcataattgcgtttgtaacattctgaataatcatgctgtaatgatcagtctcacctttaatgacagcgcctaaagtcataataccatcgtagttatttgaattgagaagcttattagcagtaaaaccaatttcaaaagcacctgggacccaatagatatcgatctgatcttcaagtactccaaattgctttaaagtagcaatagcaccgtcaactaaatgatgggtaacggtttcgttaaacttggatgctacaattgcaacgtgataattattgtttttaaaatttccttcataaatattcatttctgtgttcctcactatagtgcttctaataaatgatggaatttatctcgtttagtttctaaatagtcatgatttaccttattagcaggaatttccaagggaattcttttttcaatagtaataccgttattttctagttgatcaattttatcaggattattagtaagcaaattgatatgactaatacctagatcttttaaaatcttggcagcaataatataatttcgttcatctggcttaaaacctaaaatttcatttgcttcataagtgtcataaccttggtcctgtaaaccataagcttttaatttgttaattaatccaattccacgtccttcttgtcgtaaataaagaattatgccactaccatttttattcatttgcttcatggcagtatgtaattgatcaccgcaatcgcagcgcattgagccaaacgtatcaccagtaaggcattctgaatgaagacgtactaaaactggctttttaggatcaatctttcctttaataatagctaagttttcattggcgaaagccttaattttgaaattgccatatttagtgggaaaatttacaaactctgagcgtttactcacaggactattaatatattcttgtagttctgcaattgttaaaaatggtaagtgatattctttagcaatttctttcagttggggacgacgagccatatggccatcagctttcataacttcacaaatatatgcaacttctggttcgccagcaagatgagctaaggcaatagaggcttctgtgtgaccattacgattcttgatttgatcatctttagcgactaatggaaaacagtgacctggtctaaagaagtcttctggcttggaagtaggatcagcaattgccttgatagttgccgcacgatcataagcagaaatacctgtagtggtggttttgtaatcaacactgattgtaaaagctgtaccgtatggatcagtattattttgttccatttggtagaaatttaaacgttgggcaattgttttacttacaggggtgcaaagtaagccacgagcatgtttggtcataaagttaacattttcaggagtaactttagaccctaagccgatcatatcaccttcagattcacgatcttcatcatcagcaacaatcactaaaccaccatttttcatccattgaattgcattttgaatttttctaacatccattttaatttctcttttctaaattttttgcaacatattttccgataatgtcggtttccaaatttacttcatcatttatctgtaagttggctaaattagtttcgtcttgagtatgtggaattagacctaccgaaaaactgttatctttaacatccatcactgttaatgaaacgccatttaaagcaatactaccttgaggtacgatctgtgttgataatcgggcaggaaacttaaaccaaatttcaattgcattttcattctgtgctattttagtaactgttgccaaatcatcgatatgtcccgtaacaagatgaccttctaaacgttgaccgacttctaatgaacgctcaacgttaagttgatcaccgttatgcaaattcttaaaaacagttttcttataagtctgaggcatcatggttacaacaaaactagtttcagtaaaactttcaaccgtcaaacaagtcccattaattgcaattgaatcaccgaccgttagctcattagtaaagtctgcagggcacgaaacggttagcttaattgtttgcttgtgtttatcaatttttttaatatgagcatccccgcgaactagaccactaaacatgttttaattcacctgcaattcgttcattgttgccaaaggctgtttttttaacatttgttaaagggacagtttcgtttggtactaaacctgttacgccttcatctccaagaaagatcggcgccgtatatttaattacttcattaacaaaaatttcattcataattgctttttccaaagtagggccaccttctacataaactgactggatttcttttgtactcaaataatcaaatacttcttggatcttgtttgttgctaaatgaataattttgattttagaattagtaaagttgtttttagacatttgcttattttgagtgaaaatccaagtgggatttgtatcacttaataagcgaagtcgtaaatgatttaacagccgtccgcgacgatcaatgataatacggattggcggatagtcacttttgacattagttcttaaaatagggtcatcaatgatagcagtcgaagaaccaatcataattgcttgataatctgcacgttcagaatgcacttgctgatacactgcttgattagtgattggagttcgctgaccgcgcattgcaactttattatctaaactagttgcttctttgactgtgatccagggaaacccatattggtaaaaatagctgtagaacttattaagtttacttgcgtcatcagctaaaacaccagtagttacttgaactccattctcttgtagtttggcaattccttttccagtaactaatttgtgtggatcgatttgtccaactacaacacgtttaatcccacttttgataattaaatctgagcagggaggctgtttaccataatggttgcatggctcaagagtgacatagagagttgaattaaataattgttctggggttaattttgaaatggcatcgcgttctgcatgattttgtccataatggtgatgatagccagtagctaaaacttgaccgtttttaacgattacggcaccaaccataggatttttccatgtttgatagcgaccttttttagcttcttctaaagctaaattcatataaaaattatctttttccattaaaatcacttcctcgtagaacaaaaaagaacctcgagtattctcgaggttcagtaataatattcaaagtcaaataatcaaggcaaacgcaaataagcgttacttattggttattattcttctatcatctagactatactatcggtaccgattatcggattccaccgctttcgcgggttgcggacttcaccgccggtaaggaatttcaccttgcctcgaagaacatttatttaattcaactttatcgtaaaactgaactagctaaatgtcaataattaatttaagcggttacaaacaaaaacagattaaataagggagcgatcggacatcaagctgcaaagatgatgaagaaatcgattaatgcacgcaatcgcatggataagaggattgcagaaaaagaaggaatgctaaagaatattgaaaaagttcctactatgactatgaattttcaggcagattatcatcgtgagattttgcaacttaatgatcttagcttgcaactaaaaaatagtagagaactatttaaaagcttgactttgtctttgaataatcatgaaattattgctattgaaggtaaaaatggttctggaaagtcaacattaattaagtatttactgggtatctctcaaaatctaattgccaaaggtaattatgagctaattgaaagtttgaaaatctcttatttaccacaagaatttgtaatgtatagcggatcattaaaagactttgctaaaaaatatcatttgtcttatgaagctttgttgagcaatcttaagaaaatgggatttgcgcgtgctgattttacaactagaattgaaaaaatgagtatgggacaacagaaacgagtagcttgggctaagtcattgacagaacctgctaatttatatttatgggatgagccagcaaattatttagatgtattcaatcaagatcaattaattaagcttcttaagagtgtgaagccaacgatgttactaattgagcatgatccttacttcattacatcggtagctgatcagcagattaaattaacaaattaactaggtatttctataaaataatcttattaggaaaagtaaaattgtaagatatattggttggaaagtccgattatcataggcataataagctatagaggtgataaacatgaaaaatgaattttgtcacgataaaatgaaatgtcagaaaaattgtccttgtgcagataaggatggcatttgccactgcaaaatggtaaatagtaaagaatgtgtttgcaaggaacaagaaaagtaacaaaagagcgccagtagatttagtttaagtttactggcgctcttttaaataaaaatcacataattttgttgcgtttaactggaaaaagaaatgaaataactggaactattaaataaagaatcattgctagtttggcattgaataatgacagaatgatcaatactacatttaaaaataaagtaaccgtcatttttctaataaaggagcggctaataataattcgcatgatttgggaatagcgcgcagtatgagactgtaaaatagtttgtgtaaggatgaatgattccttaaatttatttctttaaacattagaaaaaggagttcctttctcgtatgattggtttgaacaaaaaaacacatacagaaagaagaactccttcatgaatgattttaccaaagattttgctcaagctctattcaatccagacaaaataaatgatttattgcgcaaagagctacaacaggctgttaataacttgttagaagctgaattgactgcctttctgggctatgatccctatgccagaaatggctggaatactggcaactctagaaatggtgcttatttccgcaaagttgatacgcaatttggcccaattgaagtgcaagtgcctcgggatcgcaacggtcaatttcatcagcacacgctgcctggctacaagcagcactcggatatcttggaaagcatgattatcaagctttactccaagggcgtgaccaccagggaaatagccgatctaattgaaaagatgtatggcagccattacagtccagcccaggtatcaaatatttccaagcagatgattccaaaggttgaggcttaccacaaacgcaagctaagcgacaagtttttctgcgtctatttggatgcgacataccttcctttgcgccgagaaacatttgagcgtgaagcagtctatattgccattggcatcaagcctaatgggcacaaggaggtcattgactactgcattgcgcctagcgagaacattgaagtctggacagatatgcttcaaaacatgaaatcccgaggcttaaagcaagttgagctttttctttctgatggtgttgttggcatgaaaacagccttggccaggacttatcctaaagctcattttcaacgctgtttggttcatgtcatgcgcaatatctgcgctaaagtacgcgtcgacgatcgtgaaaagatcatgaacgaattcaaacaggtgcatcaacagacaaacaaagaagaagccacagctgtcctgcatgacttctataccaaatggggcaaggtttacagccatgttatcagaagcttgaaagacatagaaccagatctgctggtcttttataactatcccaagcagatcagagcttcaatttattcgactaacatgattgaatcatttaacaatgtgatcaagcgcaaagctaagcctaaggcagagtttccaactgaacagtcgcttgatgcttttattggcattcaggcaatgagctacaatgaccgttatttcaatcgaattcataaaggctttggtcaggttcaggacaccttagaatcctactttgattaaataaataattaaaaaatcaatttacgagaaagaactatttacacaaaagatttgacagtttccgcagtatttttagcaccaaaatattgaattagatattctaagattttggcaattaaaaaaacaattccaaagttagctacagcgaaagaagaattttcagccataatccatttagtcatgactggcagaagtgataaatcagctagaaaaaagaagtctagaatggcaatcgcttttgaaggtttgaaaatatagtatgaaaaagataaatgtagatcataccagaagtctgccacaataaaaaaagtgattaaaaagacagcaatgttgctaatgaattgctgataatgaatttcatgcagagcaggttgaatttctaaaacaataattgtaatgataatcgccatcactccatcattaaaggcttgtagatgttcacgtagactttcaggctctttcttttgggcctcagctaattcttttttgatattttttaatttatctttttcttggtctgagaactgattaaaattgtgtcttctgggatttcgtggcatggctattcctccagttaaattaatttattaatcaataattactttagcataattttttacaatcaagctaaaaactgagattgccaaattaatatcataatttgctttttggacaaatataaagcatgatagacagtaatcaaatattaggagggaatagtttgaaaaaaataatcgctaagcctgttggaatgtttgaattattctatgatttagtttttgtgtatgtaatttctcgaattactgcgatgattcatcatcctgttaatggcagtattcctttagttactttttttcaatttttattggttgtaattgtagtaatgcaaatttggctttatcaagttatctattttaaccgatatagcaaaaacagatttttagatattggcggtttagttttaaatatgtttgtagcagtttatctggctaacaatattaatactgaatggcgaattacttttcactattttaatattgcaatggctgttatgatcttaattttattttgtcagtatctatttgtaaaagcagataataatgataaacaagcctttttaattattttaggattggaatttatcttaattattgtaggattaatcatcggctaccctgttggaatttatttttgtataagtggttatattgttggttttattttgccattgtttttaaaagggatgtttaaagctgaacgagtaaattttcctcatttggtagagagagtaagtttaatcgtaattattgcctttggtgaggctattgttaatttgacaagttatttcaatagtaagacaccgttagtttatgctgcttttttgtttttatctttagtattaatgtttgcaagctatgttgtcttatcagatgaattaattgatcatcaccagataagtaaaggctttatttcaatgtatagtcatattgcaattgtagtcgcaatacttttgtcaacagtagcaatacagtatttacaagtgcagaatataaacaaaacttttttatttttcctgattattttttcaatggccttatattatttctcattagctataaatcaagtatataataagagtgaatgtcgatttagtattcgtaatctgttaacattgctactaatttttgcactaggagtaagttacttatgggttgtgataaaatctaaaataggtatttcaatctgcctattaatttggaatttgttatttttcttagaattttatattaaaggcaataaaaatgaattcagatgatcaatttatcaagtgggcgacagatttacaaagtttagctcaagcaggattgcattatggtcatgatgtatttgatcgtgagcgctatgaaaaaatccgtaaaattgcaggcgaaatgatggcagctaggacaggactacctaaagaacaaattaaaacactctttttgggtgatgagggctatcaaacacctaagattgatacgcgagcagcaatttttaaggataataaaattttgcttgtccgtgaaaaaatgactcaggaatggtcattgccaggcggctggaatgattatgaccaaactacagcacaaaattgtgttaaagaggcatatgaagaagcaggtagagtagttagacccgtcaaaattattgcagttcaagatcgtagtcatcataataaaccaattttggccaccaacattacgaaggtattttacttatgcaaagaaattagtggtgaatttaagccgaacgatgaaactgatgcttgtgattattttgcattagataatttaccgaagctttcacttgggcgaaatactgaggaacaaattaccatgtgttttgcggcaaataatgatcctaattggcagactcaatttgaatagaaaatttgaaaaataaataaaaaagttgttgacaacgattatattttgattaaaatagttattaacaaatttaataaatctgaaaacaaagagaaagaagagtaatttagacttaatttacagcgagtctcgttaggtgtgaggagataaatcctaagtttaaatgaaaatcactttcgagttctatttcttaacttaaagtaagaagtagtgggagcacccattatagtgcctacgtatcgtcaagtaattgactgtacgtgaaaggtattgctagcaatagtgatataaataaagggtggtaccacgctcaaagcgtccctcagttgcaatttgcagctgagggtcttttttgtttatcagggatgttttggaggagagaaaatgacagatcatacatcgaaaaaacttacatggaaaaattatctcgttgttgcttccttgctgtttggattattttttggggctggtaacctaatttttccattacatttaggacaactagctggagcaaattggggaacagctgcaattggctttttaatcacaggggttttattgccattattatctgtattagcagtagcaattactcatgcaaacggagtatacgacatcggtaagccgctgggtgccggatttgcagtagtatttatggttttaatccatgccacaatcggaccattgtttggtaccccaagaactgcaaccatttctttcacagttggtattgcaccatttatgccgaagaatatgcaaagttccgctttacttgttttctcagctttattctttttagctgcttttgctttttcttatcatcaaaataatatcttgtctaacgttggtaaggtattaaatccattattcttggcattattattcctagtgtttcttgtagcttttgctcgtccgttggggaatccacaaactgctgcagtaactgctgcttataagcatggagcattagtaaatggcttcttagagggttataacacaatggatgccttagcaggcttagcctttggggttacagttgttacagctgttcgtggcatgggacaaaaagatgctaaaagtgtttcaaaagttgttgctaaatcaggtgtcttggccgttttagcaatcggttttatctacttgttattgatcttaatgggtgcaatgtctctcggacgctttgcagtttctgataacggtggggtagcctttaaccaaatcgttaacgtttatggcggtgtctttggtcaagctttacttgcattcttattgacagttacctgtttgactactgcagttggtttggttgctgcttttgcgcaagactttcataagcattttcctaaggtaagttaccacgtttggttagcacttagttgcttggcatcattcttagccgctaactttggtttggatcaaatcatttcatggtcaacaccgatgttaatgttcttatatcctttatccatggttttgatcttgctatcagtttgttcaccattgtttaataaggcaggtgtagtttactttttcgtaatcctatttactgttgtaccagctttaggcgatatggtagttgctttcccaagtgtggttagtcaaagttcatttggtttagcagtggcttcacttagaaatcatttgccacttgccagcatgggcttatcatggttagtgccagcactggtaggtttagcaattggtttagttgtatatcatgttagaaataaaaagacagtaccggttttagaagaagactaaaatttgtgtattttagatgaaggcagtgattgccttcatttttttgcttctgagatgaatagttgtgaatagacatgataaaattaaaatgaaattattttaataaggagaaccacatgcttccagtacgatacggtattaacttagcaccagaaattaaagaaaataagattgatattattaagaatgagccttttactgtttgggatgcagatgtaataaatattcaaaagcaaaagtactatttattagttgaaaaagacactagttttccaattttattaactaaacttgataccaaactgtttaatgatgtttttgctaatgcgattaaaagctatgactttattttgtttaaacagcaacaaaaattagtttcagcggtaaagtccaagcaaatgtctttttacgatactaaaagccaagctagtttaatgctagaaaaaattcgtaaacttatagaggataatcaaagcgaatatttaaatttgattgatgttgtaaaagatgaaaagaatatcgtagataagctaactgtaatgtcagcgactatttttgccttggatagtcagattggacaaaattttatttctaagatgattgatgaggttagtacgtatttccctattaagccgcaaaaaccaaatcgaagatataagtatgttgacttagtgccaaaatttgaagatttctctaattttgaaaaatatgaaaataaaccagtaaaaggcaatgaaaagattgttgctaaaattaaagaaaataatcaaaaactcattgatcaatatgctaaatatgtaccagcaggaataggatatatccaacctgatcaaatgctgccggattatctaaatcattatttattacgtaataagatccatttagttactaatgatttaggagaagcgatttcttatttatggattatgatatctaacaataaactacatccgctagaaatagagcagattacaaatactttgaaaaatttctatgtatttttgagtagagtaggtcttattcgtaaaactgatagtaaagaaatagggatgaatattgactgggtagttgaagaaattaattcatactccgatcaaggcctggatgaggatttgataaacgatatgatagcggcaattgaagcaaatccgaaaaagattttggaacttgaagatttagatctgtcttctcaggatttgtctagaattttagaaggcttgcgaaaagatcttgagagtcatgataaaaagcagaaaacacgaaaaaagacaatttttgaaaatcaaactcgcaatcgagctacctatgaaattagagtaaaactaaagtcttttaaaccatctacttggcgtagatttattattagtggcaatacgtcagtgaaaacattagaagttgctatgctagatatgtttaatgcagattttggacatatgtttgatttgctgaataaaaaaacgcaggaacgctttgaaaatgcagaaagtatcgctgaagcgaaagattgggatccggctacaggcatagattatgaaaaagctaaggtttcgtattttgaaaagagagataaattattattaacttatgattatggcgatagctgggaattcgaagtagatattaagaacatcactactgatcaagcagctcctaagtgtccaaagatactttctggaaaaggttatggaataattgatgacattggtggtgtatggtctttgcaagattattacgatacgcctaaagataaagtagatcctgaaatgattgattggttaatgggtggaaaagcaattaatttagataattttaataaggaagaacttaatcaaagaatggaacaatataagaactaaagaaacatactaacctagtgttggatcatgaatcgacggattcacgatctggcactttttattttgtctaaaatagaaagtgaagataaagcaaatcaagtcttcagctttttagacacttgatgtcgtaaaagaaacggactgctttaccacctattcttaagtctcttcgaagtctgtgggcacttagatgccgtgtttagaaaattagaattaataggttgataaagaggtttatcttcacagcggaggttatattatggaatcacaaattattttcggtattgatgttagcagtaaatcttccacagtttgtgtggttaatgaccggatcaaacaaggcgaatcttttagaatctctaatgattcctttggctatcaaaaactttatgagcaactgaaccaatatttgataactcctttagttgttttcgaagctactggtgtttattctctaagcctgcaagctttcttagaggattatcatattaagtatttgaagcttaatccgcttaaagcgaaaaagctaatggacaataatttacgccataataaaactgataaggtagatgcttatcgcctggctttaattcaatttaatgccccgcaaaagctgcgtgatccacagcccagagagtatcatgaacttcagaatgccagtcgctattatgaagaacttactaggagtatagttactactaaaaatcaattgcaccgcaacctccaatccactttcccacaaattgaagaaatactgtctcatccatctggcagaatttattgggcgcttgttagtcttttcccacatgctggatatgttctagaaaagaatgagacacaggtaactcaaatgcttaattctatttctggaataggacaacaaagggcacggtacttaaccacaagattatacgcttttgctagagaagcttatccttatgattccaaagatagtattatcgttagagctattcaaaggaacatttctaatttattttcactccagcaagaacgcgactatgtaattaactacatggaaaagctggctaaagcagtaaacgctcgtgctttatccatctatttgagtatcccaggggttgctagaattacagcagtgagattagtagcagagctcggtgatctaagacggtttagcacttcagctcaaattgatgcgtttgttggcattgatccaggaaggtaccaatctggtgaaaaagacagttctcttggcattaccaagcatggcaatcatattgccagaaaaatactttatcgagttattactcaaatggagacggtaaaggctacgcagccttgccatataactgattattatgacaagaaaaaacgatcttcaaatagacaaggctataagaaaatcgccattgcatcagtccataaactgatacgcacaatgtttgctcttatcaaacatgatcaattatatgattacaacatagccaccgaaaataaaagactttagctgaaatcaaataatcaacttaagtataagcaacctatggaaaaactacaagtattcataggcttatttgtggtactttcgctttttcttaaatttaaactcttatttgctttaaccttattcgcatcattaaaacaagtaaatttattttcttaaatcattgataatacttgactttgggtagaaaaaaaagattaccttagcatatgtgtatgtactgaggcaatcttttttaaattttacagcaacttttttaattcatttacagcagtattataatcgggctcatgagtaatttcatcaacaatttcacgataaacgattttaccgttaggctcaagaatccacacactgcgtgctagtattccagattctggtattagtaagccagtagctttaccaaaagataatttttcatcagacattaattgcatatttttaacaccttcagccgcacaccaattttgttggtctttgatggtattagttgaaatagttaaaaagttaacgtcaggaaactgatccattgttttgttaaaagtcttagtttgaatactgcaaacggaagtgttgatgtctggcacaacgctgattaaagtatttttacctaacaaattatctttagtaacttcttgcttatttttgtctaaaactgtaaagttaggcatttcatcgccaaccttaggtggtgtgccaattaattcaacttcttttcctttaaaagtaactttcatgaaattcctccttttattatcttttaacttaaatatagcaaactcagttcaataacttaaatatttagcttacagatattaatttttaggattttaaattttagcatcctgtattttgaatttaaccacttatttaaatagtgaattcggaaaggaagactttttatgttaattggaacttttagcttattctcaataatgatgttgttaaataattggtctatcaatatttggacattgtttatttttattctttcatacgttgttatttggataacaatcaagttaacacaaaatcgccaaattaagaaacgtaatagctaattaataatctttattcattcgctttatgcatagctaactattaccaataaatattttttataatagttattttgatttacgatttttattttttaaatcatttaacgaaatactattttggcttgcaatgagagcattatttttgcgaaagagaattgcaaaagattcattagtaatttgcgtctcaattgcagaaccttgaatttgagtaaagaagtcgctattgataactattgcatctaattttccctcattaaatagattaaaattttcagcaaaaatatcgggcatcagataggcacttatattatcaaataccccgactcgtaaggtggttatagttggctttagcgcaattatttcttttaaatcttgaagtattttatctgacttatttttaaaagcaagtccagcagcagtgaggacaataccattagtattcctaataaataatttcttattgacaatagcttctagctgtctaatttttttactgacagtagattggtctaggtagagatagttgctagcttgactgaagctagcaaatctactaacaacatcaaaaatatgcagtagttcgaagtttagtttattcatttatgattaactccttattttgagtagaaataataaatctattttagcaacaaatgtaactaaaatccttttcttagtaaagaattgaaactgtcaaatcttttgtgtaaatagttctttctcgtaaattgattttttaattatttatttaatcaaagtaggattctaaggtgtcctgaacctgaccaaagcctttatgaattcgattgaaataacggtcattgtagctcattgcctgaatgccaataaaagcatcaagcgactgttcagttggaaactctgccttaggcttagctttgcgcttgatcacattgttaaatgattcaatcatgttagtcgaataaattgaagctctgatctgcttgggatagttataaaagaccagcagatctggttctatgtctttcaagcttctgataacatggctgtaaaccttgccccatttggtatagaagtcatgcaggacagctgtggcttcttctttgtttgtctgttgatgcacctgtttgaattcgttcatgatcttttcacgatcgtcgacgcgtactttagcgcagatattgcgcatgacatgaaccaaacagcgttgaaaatgagctttaggataagtcctggccaaggctgttttcatgccaacaacaccatcagaaagaaaaagctcaacttgctttaagcctcgggatttcatgttttgaagcatatctgtccagacttcaatgttctcgctaggcgcaatgcagtagtcaatgacctccttgtgcccattaggcttgatgccaatggcaatatagactgcttcacgctcaaatgtttctcggcgcaaaggaaggtatgtcgcatccaaatagacgcagaaaaacttgtcgcttagcttgcgtttgtggtaagcctcaacctttggaatcatctgcttggaaatatttgatacctgagctggactgtaatggctgccatacatcttttcaattagatcggctatttccctggtggtcacgcccttggagtaaagcttgataatcatgctttccaagatatccgagtgctgcttgtagtcaggcagcgtgtgctgatgaaattgaccgttgcgatcccgaggcacttgcacttcaattgggccaaattgcgtatcaactttgcggaaataagcaccatttctagagttgccagtattccagccatttctggcatagggatcatagcccagaaaggcagtcaattcagcttctaacaagttattaacagcctgttgtagctctttgcgcaataaatcatttattttgtctggattgaatagagcttgagcaaaatctttggtaaaatcattcatgaaggagttcttctttctgtatgtgtttttttgttcaaaccaatcatacgagaaaggaactcctttttctaatgtttaaagaaataaatttaaggaatcattcatccttacacaaactattttacagtctcaaagaattagatgtgagttttacgtcaaatgatgaaatagatatttactagtatttactttgaactaaagtctcaaattagtaaaaaatatgtttgatatctaacaaatataaatgcaaaatatgttagacatctaacaaaaggaggacctatatggaaccgataaaaaaggttattaagcaatcttccattcaaatagatcgtgaacgagagacgtttgctaacactttgggtatcaccggcgttcaaatgacaactttagattttatttctaatcatcaaaatcaaactgtttcacaacatgaaattgaaaagaaactagatttaaagcgttcaacggtgacaatcatgattcaaagaatggagaaaagagatttagttaaacgcgttactaatgcggtcgataaaagacagaaggatgtttctttaactgctaagagtaaatcacttattcccaagataaaagattatatgcgtcaagatgatcgaaaagttcgtagtcattttacacaagctgaaataaatacggcactaaaagttttaaaatttgtcaaaaatggagaaaaaatggaatcaaataatgaaagaatatcatcaaaagtgtttgcagcagtaattgccacgggattaatgtcattttctggcgttctagttgaaacttcaatgaatattgcttttccaaccttgatgcgtgattttaatgtttcaaccaatgttgtgcaatggatgacttcaatttatttgcttgcagtttcaattatcgtgccaatctctgctgcattaaaaagttcatataaaactaaaagtctatttttaaccgctaattttttgtttttacttggcttaatagttgatgctactgcaccaatttttccggtgctattgatcggaagagtaattcaaggcattggtactggaatcgccctgccattaatgtttaacatcattttagaacaagtgcctaagggtaaagttggtactatgatgggtgtcggcagtatgatcactggaatagcaccagcacttgggccgacctttggcgggattgttctacaggaactgaattggcgctaggttttttggtttttaattccattgattattatttcattgttattaggcatctggggtattgaacaaaaatctgctgttaaaaaagttaagattgatcgccttagctttatcataattgcaatcttctttattgggatgctggttggctttagcaacttaggaacaggacaattgggtgcaactgctattcaaattttgattgctttattagctttagctctgttaatttggagatctaatcgaattaaaatgccaattttggatctaaaattatttaaaaatcatagttttacaggtcatattattggttttttctgcattcaactaatatctttgggcaatgcatttttattgccaaatttcattcaattggttaatcataatactgcttttttagcaggcttgattgttttgccagcaggagttgctggtgcaatcatgggtccaattggtggtcggttgctagataattatggtgcacgcaaacctgttttatttggtgtaagtttgatgttgcttgaaacattgttttttgcagtattacctaatcagatgaataatatttttatattgatagtttatatcatttacatggcagtaatgggaatgatattgggagatgttatgactgatactttggcagtgattgatgagagtgaaactactcaaggcaacgctattctaaatactgctcaacaatttgccggtgctgtcggaacttcaattacttcagcaatcgttgcttctagtcaaaaaggtactaagtcagctgatttaaccagaatcggaacacagcatgcatatatttttcttttatgtttagttattttaatcatggctttatttatcaaatatgttggtagaagaactgcaactaagtaaaggatcacatattcaagatattgctttttcaaaaattatctgctattattttacttacaaaaagtaagtgaaataatttaggagttgataaaatgaatattgaattaggtatctcatcatttggtgaaactacaccattagaaacaacaggaaaagcaattagtcatgatcaaagaatcagagacttattagaagaaatcattcttgcagacaaattgaatattgatgcatttgcaatcggtgaacaccatcgcaaagattttgctgtctcagcaccggaaatcattttagcagctgctgcttcgaaaactaagcaaatccatctttcaagtgctactacaaatctaccaacaattaatccaattagagtttatgaacaatatgcaacaatggatgcaatcgcatcaggaagagttgaaatcatggcaggacgtggatcatttactgaggcatttgatctattcggttatgatttagaaaattacgatgaactttttattgaaaaactagaaatgctactcaaaatgaacaaagaagaaattctcgattggccaaaaggaaagtttacacctagagttgatcataaaggaatttatccgcgcactaaaaagccaatccctatttctgtagctacaggtggaagcatagaatcgactatccgaactgcagagttaggtttgccaatcgtttatgcgataattggcggtaatcctttgcactttaaaccactaattaagttgtacagaagagttgcagaaaaagttggcaatgatttaacgaagatgccaattgctgcacactcttggggctggttaaatcatgataaagacaaagcaattaaggattacttctatcctacgaaattgttagttgatcaaattagtacggaaagaccgcaatggacagggatgacatatgaacaatatcttgaggcagttggagaaaatggagctatttttgttggcgatagcgagacagttgcaaataagatcatcaaagtcatggaagaacttgggttaactcgcttctatcttcatttgccaattgcctcaatgccgcatgaagatgtgatgaatgccattagaatttatggcgaagaagtagtgccgaaggtgaagacgtattttcaaaaaaagactgagcaagatcgtcttaaattaaagtggaagaattaaatagagagtaataatatagggttcaagagtctaaatgacttttgaaccctttttcacttttagagataaacctaaggaggatgcttattatgatcattcgcaccgtaacaatggatgatttaaatgaagtagtagaactggaatctgacgcatttaagatgactaaaaagcaaactgaacaagatatgattggtagaattgagaattatcctgatacttttttagttgcacaagaagatggaaaagtgattggtcatatttttggtcctgcttttaataaacgctatattgaagatgaattatattttgaaaatcatcctaatcaaaaagatgatcgctatcaaatggtcttgagtttagcggtcttgcctgaataccgcaaacaaggcgtagcgacaaaattaattgaagcaatagcgcaagagggcagaaagcaaaatcgtcaagctatatctttaacttgtttaccgaaattgattaaattttatgaaaaacgtggtttttataatgaaggcgagaccaatgatgatattccagatccaactggtgttactagcgtaaatatggtaaggactttgtaaaatgacgcaattaactgaagaaatgtatgcaatttttgatcgggatgaattttcttttaaaaaattgaaatcgcaatattctgaagatgaattagcgcaaataaaaacagattttaaagaaatttggcagacctggaaagaaataaacttaaatgtttatcaaaaattaccacaagataaatttgctaaagttcatgttgaaagttggaccaatggttggaacttacgcgatcattactgggcagcttatcgtttgaatgctttagccgataaaagtccatgcatcggcgtgatgctggataataagcagctgcaggtttatcttatgtttcagcattataagagtgaaaagcgcggcgataatcctgaacaatacaataaattattaactgatcttcctgattgggcaaaagggcggacaactaataattggtacttatgggataaaaacgaaatggagtttgctgatcatttatccttaaatgagtatttaacagatgctgaaaaacagacttcatttaataaggaagcaactcaatccagtttcctattaggaaaatttgcttttagaaagcaagatcaagttgcagatatggaaaacttcatcttagatggtattgggcagctattgccgttatatcgaaagttagcaaattaaaatacgttaaaattgtattttaaagtgttcatgctacataataaaagtaaatactgctgttattgtttaattaaagggataacaaatggatatttattcaattattggcatgatcattttagttttagttaccagcacagtaactagtatgattgttgccttaatttttgtattcttaggaattgccatgtttgttgtgcatttaattaagtgaaatctatatgtaaaagtaataatgcaaaataacaaattgatattttttgaataagtattgctgtgctatattgaaggtgttactgctccatcattggtgcaattgatcataatccttctgcaggtacagttctccttgataaaaaataaaactaaattcatcaacgttatctaataatgatataatgtctgtgttggattttttagaaaagagataaaaacaaaaatgaatacaatcgcatttaaccaacaattatcagataagttgaacgaagaacttaatccagaattgttctctaccccaggtaagggtgagattacagttgttgctaatgaaaagaaagacttacgtgagtaccgtattattactaaggataataaagtagtcgatgtagtcgatgcatatgatgcagatcatgatgcagcttatcaaaagatgatagatttcttgaagaattaccgttaataattgaattaaactaatgggctagaagcttgataatgagtttctagtctatttttttgccaatttttcctaatgaattagctagatatagtaataattttgccgttcaagttatttttttaaccacttagtaaaaagtaattgaatattaaaaaaatagcagtaatattaaacataaataagatatttttaatattttaatttgcttggagatgagacaaatgagtattacagggatttttaaggtcaataaagctaaattcattttaatttttctaatggttatcattggtacaaccgttgatgctgcttcgcaatatttgatgaccccggcctttaaccagctaaagaaaatgaatttatttggctttattatttttatttgtttggctattggctgtgatctagttagattagccttgattactagttcagattacttatacggaaagcaatcacaatcttatttgcaccaaattcgtgtaaaaattagtcgctacttttttaaaaatgaaattgcccaaactgctaaagtgcaaaatgaattggttgccaatcttgatcagctaacacagaattatttaaaaccaatcaaaaacggttttatgtacttgttgtctgtgcttttctcaattggaattttgttttcatttaactggcttttagtagtaatgacggtgattttaactgcaatttcattatttttgcctaaaacttttgaaaaaatgacttcatcggccacaataaaggttactaagaaaaatgaaaagttcttaaacactttagccaagtggatgagtagcctggatgaattacgaagatatgccagttttaatatatttagtgaatcagttaaccaaagcgcagacgaatataaaaaagcagctattcatcaaggagcaactattgctattgcagatatgatcacctttgtagttaatattgtgggacaaatgctcttgatggttttatgtgcttacttatatttgcaaggacaaattgtttttggtgcggtaattactactattcaatttagttcaactgtaatgaatggtgtttcagcatttgtaacggaatggaatttaattaaatccaccaaggatttgaataaggaaattactaatcttcaagctccagtaaaaatagctccagatcagcatcaagttaagaagattaacaggctagaagtaaaagatctggccttacaattcaaaaatggtgagtatttatcttacccagattttacagttaagcaaggtgaaaaaatcttgcttactggtgatagtggaactggcaagtcaactttatttaaattaattttaggtaaattaacgcccagccaaggtgagatcaatttttttgatcataatggtcaaaaattaaattttgatcttgatgaattaggctatattgctcaagataataccttgtttcctgacacaattgccaataatgtcacgatgtttaatagtgctttaaataatcaaatttcaggtgtattagatcaagtaggttttaccaaggatttggataagatgtctgctggacttaatagtcaaattgatttggataaaggaaatttatctggaggacaaaggcagaagcttgtgttagccagagctttgattcatcaatcaccttggctattgatcgatgaagggactagtgcaattgacagtgctgggacgaagcaagtattacaaaatttattgaatactccaagtactgtaattatgattgcgcacaattattctacagaattagtttcaatgtttgatcggcaaattaaattgactaatcgaggtgacgccgaatgagtttcaaaggctttattaaaactaattatttaagatttatttacattaatattttatcagttatttcaggtgtcgctgctattgggagactgtaaaatagtttgtgtaaggatgaataattccttaaatttatttcttaaaacattagaaaaaggagttcctttctcgtatgattggtttgaacaaaaaaacacatacagaaagaagaactccttcatgaatgattttaccaaagattttgctcaagctctattcaatccagacaaaataaatgatttattgcgcaaagagctacaacaggctgttaataacttgctagaagctgagttgactgcctttctaggctatgatccctatgccagaaatggctggaatactggcaattctagaaatggtgcttatttccgcaaggttgatacccagtttggaccaattgaagtgcaagtgcctcgggatcgcaacggtcaatttcatcagcacacgctgcctgactacaagcagcactcggatatcttggaaagcatgattatcaagctttactccaagggcgtgaccaccagggaaatagccgatctaattgaaaagatgtatggcagccattacagtccagctcaggtatcaaatatttccaagcagatgattccaaaggttgaggcttaccacaaacgcaagctaagcgacaagtttttctgcgtctatttggatgcgacataccttcctttgcgccgagaaacatttgagcgtgaagcagtctatattgccattggcatcaagcctaatgggcacaaggaggtcattgactactgcattgcacctagcgagaacattgaagtctggacagatatgcttcaaaacatgaaatcccgaggcttaaagcaagttgagctttttctttctgatggtgttgttggcatgaaaacagccttggccaggacttatcctaaagctcattttcaacgctgcctggttcatgtcatgcgcaatatctgcgctaaagtacgcgtcgacgatcgtgaaaagatcatgaacgaattcaaacaggtgcatcaacagacaaacaaagaagaagccacagctgtcctgcatgacttctataccaaatggggcaaggtttacagccatgttatcagaagcttgaaagacatagaaccagatctgctggtcttttataactatcccaagcagatcagagcttcaatttattcgactaacatgattgaatcatttaacaatgtgatcaagcgcaaagctaagcctaaggcagagtttccaactgaacagtcgcttgatgcttttattggcattcaggcaatgagctacaatgaccgttatttcaatcgaattcataaaggctttggtcaggttcaggacaccttagaatcctactttgattaaataaataattaaaaaatcaatttgcgagaaagaactatttacacaaaagatttgacagtttcgctattggtgcaggctacattcaaatgtactggctgacttatatcaaagatcgtgcttgggtgaagattttacttgcgacggctttaatggggattttatatttagctgctcaagggatgatctattatatccaatttgtaattcgagtgcaggaagaagaatataataaaaaggtgcgcgctcgtttggctacacattactttagagatggtcaaaatcatcaagtaccggccgtgcaaaatcggatgactaatgattagaaaaaattattttgattggtatccaattgtgccgttctatggctcaatgtttgttgcggcattggtggctctacttacaattaattggtcaatctttttgactagtgtagtgattgatattgtttcttactttgtacctaaattagtacaaaagaaaatggaacaagcaactaataatgtttctgagcaaaataagcattatctagatgttttagctaaatggttctctggcttagaagaattaagaagatattttgctggtgctaagttatttcaggtaggtgaaaaaacttcaagtaaagtagaacaggctcatgttaaacaaacggctgctcaacagcaattaattattttgaatgggatctgtaacatggtaggacaaataatcctgttgtctttgacggcttttttgatcactaagaatttagtgatttttggtgcaattatgtctgtccaaaactttgcagctaatatttcgatcggcttacaacaaacaattcaggcattaagttttatgaaatcgtcacaggatttaatgaaacaagttgatggtgatgctactgtgattgaaaaagttaaagctggccaagaagagacaccagtagcattttcaacaaaagatttggctttgcagtatcctaatggtgaaaagcttacttttcctgatattgcagttaaacctggcgagaaaatcttattaacaggagattcaggcgcaggtaagtctactttatttaaattgattttgggtgaacttaaacctagcacaggcaaaattgaatttcaaaatagtcaaggtttgacaattaagcctaatatgtcaagaataggctatattccacaagagccgaacctatttccgggtacaattaaagaaaacattacaatgttcaacaagcaacttaataatcaagtagctcaagtgcttgatgaagttaattttgcggccgatattaaaaagtttaaagcaggtgtcgatgaaaaaattgacttggataatttgaatatttccggaggacaacgacaaaagatcgtattggcaagatcgaagatccatgatagtgacattattttgattgatgaaggaactagtgcaattgatcagacagcgactatggatattttacaaaaattattaaaaagcaagaccacaattgtctttattgctcacaattttaataaacagatgcaggaaatgtttgatcgcgaaattcatttaataaaagaataaaaaatcaattagagaaaagactcccaaatattaatatttttaatttgaaccttgacaaaatgttgatttaaccagtaaattaattgcgggttattaattaggatagattaattattggagttgtgaaaattgaataaaaaatctaaagctcctcaactcaaacgaacaatgacagcaggccaaatggagatgatctctcttggcggtgctatcggtgttggtttgtttatggggtcaacctcgactattaaatggaccggtccgtcagtattattagcctacatgtttgtggggttgattttatatattgtaatgcgggcattaggtgagatgctttatatcaatccagggacaggttcatttgctgattatgcaacagaatatgtgcatcccttagccggctatttagcgatgtgggccaatgtctttgaatatattgtagtaggaatgtccgaagtagtcgcggcaactgaatatctgaagtattggtggccgaatatttcggcgctgtggtcggggatcatcattattgcctttttactactagccaatttagctagtgctaaggcttatgcatcactagaattttggtttgccatgatcaaagtaataacgattattttaatgattattttaggctttatcgttattttctttggtgtaggtaatggcggccacccaactggctttagcaatttatggtctcacggtggtttctttactggtggaataaaaggatttttcttttcaatgtcaatcattgttggttcatatgaaggaatcgagttattaggtatttctgctggagaagtagccaatccacaagaggcaatcgttaaaagtgttaagtcagttttgtttagaattctaattttctatgtcggagcaatttttgtcattgtaacgatttatccttgggataaattagacagcctaggttcaccatttgtaacgactttcgctaaagtagggattactgcggctgcttcaataattaacttcgttgttttaacggctgctctttctggtgctaactcagggatttattcttccagcagaatgttgtttaagctatctcatgaccacgaagcaccgggaatttttaagcatatttctaagcgaattgtacctgatcgtgcaattatggggatttctgctggtatttttattggttttgtcttgaacgtaattgcttcacaatttaatcattcagctagtgatttatttgtaattgtcttcagttcatctgttttaccaggaatgattccttggtttgtgattttattagctgaattaagatttagacggcataacaaagaagcgatacaagatcatccatttaaattgccgttatatccattttcaaattactttgcctttgcaatgttgataatgattgtaattttcatgtttctcaatcctgatacgagaatttcagttatcgcaggggcattagtcttgattgtggcaacaatcgtctacttagttagacacaaaaatgaatttaagaaaagtaattaaggtgattattcacctttttatttttatctaaaaacactaaatctatggtttttcattatccaacatataagatctatggtatgttagaagaaatgttttttgaaaggtgaagataatggcaattcttgaacaaccatatttggatttgttagaaaaaattatgactgaaggacatgacaaggatgatcgaactggtactggaactagatcatattttggtgcccaaatgcgttttgatttgacacagggctttccacttttaacgactaaaaaggtgccatttggtttgattaaaagtgaattgttgtggttcttgcgtggcgataccaatattcgctttttgctagagcataacaatcatatttgggatgaatgggccttcaaaaattgggttcaaagtcctgaatatcagggtcctgacatgactaattttggtttgcgtagtcaaagtgatccagaatttaatcaagtttatcaagcagaaatgaagaaatttgatcagcgcattcttgatgatcctgcttttgcccagaaatatggcaacttaggtgatgtctatggggcacaatggcgtcattgggaaaagcggacaggcggttttatcgatcaaattgctgacgtgattaagcaaattaaggaaacgccagattctcgtagaatgattgtcacggcctggaatccggaagatgtgccaactagtgctttgccaccatgccatgtcatgttccaattttatgtagtcgatggcaaaattagcgtgcagctttatcaaagaagtggtgatatgtttttaggcgtgccatttaatattgcttcatattcgctgctcttgaacatgattgcgcgtgaaaccggcttaaaagtgggtgaatttgtacatactttaggggatgcacatatttatcgcaaccactttagccaagtaaaggaattgctgagtcggacgccatatgattcacctgaattgtggcttaatcctgaaaaaaagcacattgaagactttgaaatgaaagatatcaaagtgctgaattatcagcaccatggcacgatcaaggcaccggttgcagtttaggaggtctcaatgttaagttttgtttgggctgaagatcagcagcatggtattggcatcgatggccatttgccttggcatctgccggctgacttgaagcattttaaggaaaagaccataggtcatccgatcatcatggggcgaaaaacctttgcgagtttgcctcacttgttaccagagagaaaacatattgttttaactcatcgtcaagaattaaagcaaaaatatgcgggtaatgagcaagtgaagattgtgtccacattagctgaattaaatgaatatcttcgtcaacatcagactgaagaaatctgtgcaattggtggagtttcaatctttagggcgttacttgatcaagttgatcttttagaaaaaacagagatcaaagctaattttaaaactgatacagtgatgccagcgattaactatgatgattttgaattagttagtcgcgaagagcatcatcatgatgaaaagaacaagtatgactatacttttttaacttatcatagaaaaaataaataattgttaaaaagtctcgcagagttgcgtggcttttttatttttcgctataatggatgaaagtattttcagtataggacagaaaattatgacagataaacaaataacgggattaactcaagctgaagttgatccaagaattcaaaatggacaggttaatcaagccattgatgaccagtccaaaacagctactcaaataattcgagaaaatgtctttacttattttaacttgatttttgctattttggctgtgctattggtgtttgttggtgcctggaacgatctgacttttttaccagtgattgttttaaacacgattatcggtattgtgcaggagcttcgtgctaaaaaagttttaagcaagttaaacgtgatgaatgcgacggaaattatcgcggtacgtgatgggcaagaagaaaaaattcccatcgaaaaattggttcaagatgatgtcgttcttttacaaactggtgaccagattccagctgatgcgcgggtaatctcaggtgagctgcgggttaatgaagccttgttgacaggtgaatctgatgaaatcactaagactaaagacgcagaattaatgtcaggttcttttgtagtttccggtaaggcttatgccgtcttagaaaaagtgggtaaagactcatatatttctaaattaacgatcgaagcaaaggcaatgggcagtgttgaacaatctgaaatggtgcgttcaatcaatcgtctggttaaatgggtcggcatcatcattattccggtgggaattgccctatttagtcagagtttctttttgaataatattggactcaagcgtagtatcacttccatggaagctgctttaattgggatgattccagaagggctatatttattgactacgattgccttagctctagctgctatgcgattagcgcgacaagaagtaatgctgcacgatatgaagagtgttgaaactttagcccgagtaaatgtcctttgtgtagataaaacgggaacaattaccgaaccgaagatggccgtagaaaaagctgttagtagcaagaattttactggtgatttaagtagcatcattgcggattttgctaaaaacatgccagctgataatgcgacgatgaaggcgattcaagcctattttaaagatggaaccaaaacggcggatagcattttgccttttacctcagtcaataaatattctggtgtaatttttggcaatcagacaactttaattggtgcgcctgaaatggttttgcgtgatcaatttgcgcaatatcaaactgaatttgaaaaatatgcggcagaaggctaccgggtgttgattgcggctaattatcctggcgtattaactgaagataattccgccttaaaggaaaatgtacaagttctcggttatattttattgtcgaatccaattcgtaaagaagccaagtcaacttttcaatattttaaccagcaaggtgttgatatcaaggttatttctggggataatccggtaaccgttgctcgagtagctaagcaagctggaattaatggggcagataagtatatcgatgcgcaaaccattaaagatggtgaatatgagcaggccgtgcaaaactataatgtctttggccgggttaagcctgatcaaaagcgaaagtttgtcgttgctttgcaaaatcaaggtaataccgtagccatgactggtgacggagttaacgatattttagcgatgaaaaaggcggattgctcaatcgctatggcttctggtaatagtgctgcagtgcaagcttcacaagtggttttgctcgattctaattttgctaaaatgccgttagtggtgaaccaaggcaggcaagtagttaataacattcaacgttcagccagcttgttcttggtgaaaaatattttttcattcttgatggccatcttctctttgattatgacaatcaattatccgctgcagccagcccagatcacattgatctctgcatttacaattggcttgccgtcgtttttattggccttagaaagcaaccacaagcgaattcgtggaaagtttatgccaaatgttttagctcgggcaattccagggggcttaacagattggctggcagttgcaattttagtcattgcaggggcctctatctcacttgatcatggtcaggtaggcacgacagcgactatgttgctagtcttagttggttttatggtgatgtatcatatttcggcaccaataaacaaatttagacttgctgttatgggcttatcagttatctgtattattggctcaactatcttttttccaagattgttctcattgacaatgcttaataacaaatcattatttattttggcggtcttattctgtgcggcagtgactatctttagatggttatctaaaattttggatggaatcgccgaagtgttggttgtctttgatcaaaaaggaaagaacatgacttttgtggaattcaaggaagcatatgatcgtggcaaaaataatgtgaaataagaagataatgaaaaagccagagttttgctctgacttttttactaccttaatgattttcgatatccagcagcttgtgcggcagcttcactgttgaagtaaactgcattagctgatgacatatgataattttgcccgttcattacatggtagatcttactgcgacgattgccaacgactcggtgttctgcagtggatacagtacctttgatatggtgaatggttcgtttcttggttactcgagaagtggatcgttttctagattttacatgttcagcaatagtactagacccatgtttaaccttagaagtaccggtcttgtaattaagcaacataccaggttgctcattaaaaatgtagacattaaagcgaagcccgtttttgctagttgcttcggcttccatttcaacgccgttagctaataggtcattccctttaaatattggagtaacccgatagcggacatagtttttgctcgaactacgtaaatattcagcaacctcattttcatatttaagcatatccggatcatttaattcacgcgtaccggtaatcaaattgcgtggattgttgttttgaccagtcaactgatagccgattagatggcaccgattatacaaccaaccactagcgattcgtttattatgccagccggtcggattccaagttaaagccgcacgctgactatgtggcattaatcttttatttagtaaagcattagcagcatgagctcggttcaaataatctaattggctatatttttgccatggaccttttttcttgctcaatgtactcttagaaaactgcggctgatcatgatcaacggtcacaatttgtttgttgtggtatttcaaattgactaatgctttatctgaaacagcatagacggtttgattgttgcatgggacattagtattagcaaaagaaatgaatccaattgctgcagctaatgagagagcaaaacttcgaaagcgatttttcttcattttttctccttagcaaaaataaattatttaactatatcctaattatacaatgaaatcgcttttatctaataaaaattaaaaaagatgttgactagattaaaagaagatgataacttatttataacaaatcaagaaaacaacatcttgaaggactgagtaactagaacttctattgataaagagagccagcgtggtggtgaaagttggcaaataggagctagtgaatatgggtttggaacgatgaccggtggtgatatttagctatcggcggggctgcatccgttaacagtgcaggctattttttgatagccagtgaggttgattacgtaagtgatcagcgaattaaaggtggtaacgcgagcactcgtcctttggggatgggtgcttttttatttttatcaaagtaggagtgtattttatgagaaaacggagaagaagaaataccattatttggacgatcattgggatactgatcgtgattgcaggttggtttagttttggtccaggaattcccagtcaaaatcagacaaaaactgttacagtcggaatcgttggggaaagtaaagccgaagccgcaatttggaagtcaattgctaaaacggctaaggaaaaatatggtattaccttaaaaactaagaactttacggattacaaccaacctaacaaggccttgaagtcgggcgatattgacatgaatgcttttcaacactatgccttcttaaaggattggaataaggcaaatcacggtggcgttgtcgccattggtagaacctacatcgcaccgatcagactttattcacgcaagtatcataaattgagtgacttacctgatggtgccacgattgcagtgcctaacgatgctactaacgaatcaagagcactgtttgttttgaaaaatgccggcttaattaagttgaagaagggtaagaccttagttactgtagctgatatcaccagcaatccaaataactacaagattaaggaaatcggtgctgaacaaactggtcgagtattgaattcagttgacgcttctgtagtaaataatgattatgctggtcctgctggcttgactgataagcaaacgatttacattgaaccaattaacaaagattcaaaacaatggattaacattctttgtgtcaaacaaggcaaacaaaaggacaagctttaccaagatgtcgtcaaggcttaccaaactgcagaaactaagaagctaactaaggaatactatggcaatacgcaaattgcagcctgggacgttaagttgaagtaaggaggatcaaaaatgagtattgttgaattgaaaaatgtagaagtggccttccctcagaagaagggcgaacgagttaaagcagtgaataatgtttctctttccattgaaaaaggcgacatttatggaattgtaggcttctctggtgccggcaagtcaactttagttagaacggtcaatcttttacaaaaaccaactgccggtagtattaccgttgatggcactgaatttcttaaagatggcaagcaggtgatttctaataaagaattgcaattaaagcgcagaaacatcggaatgatcttccagggttttaacctattaaatgaaacgactgtattagaaaatgtagcctttgccttaaaacatgaaaagttgagtgatgaggaattagaaaaacggtcattggaattgcttgatctggttgacttaaaagataaggctgacttttatccagctgaattatctggtgggcaacaacaaagagtagcgattgctagagctttggctaataatccagatattttgatctctgatgaagcaaccagtgccttggacccacaaaatacgcaacaaatcttggacctgcttaagcgtttgaacaaaaagttccacttaacggtcatcttaatcacgcacgaaatggatgctgttaagaagattgccactaaggtcgccgtcatggaacacggcaatgtgattgaagacggcagtttgcgagatgtcttcttacatcctaagcaggatttaaccaagaagtttgttggtggatcacttgaagcgatttctactttgaattcattggcgcttgataagcttggcaaaaatgaagcaatttatcaattagtttacagcgtagctaatgtgactaaatcaatcattattgaattgtataagcaaattggcgtagaagtttcaatgctttatgggaatgttgaacttttgaatgaagagccaattggtactttggtggtattggtgaaaggcgatccagctaagcaaaagcaaacacaagaatttttggctaagcaaaatgtgacatttacacgtttagatgaaaaggggaatgtatatcatgattagtttcttaagtaaatatttacccaatgttgttcaacttggctggggcggagacgctggctggggcactagtatttttcagaccttatttatgactttttggtcagctatctttggtggcattcttggtattatctttggcgtgattttagttttaactaaggatggcgggattcggcccaataaattctggtacaatttctcagataagctagtttcaatcttcagagcgattccgttcattatcctgcttgcctttgttgcaccagttactcaaaaaattgtaggtacacagatcggaatgaaggcagccttagtaccattaactttaggcgtatttccattttatgctcgtcaggtgcaagttgctttagaaagtgttgacccaggtaaggttgaagccgcagaaagtttgggctcaactgcgcgtgatattgtctttgatgtttatttaagagaatctcgctcagaactgattcgtgtttcgacggtgacgattatttctttgattggtttgactgcaatggctggtgctgtaggtgccggtggtttaggtaataccgctatttcatacggttataaccgattcaataatgatgttactttagtagctactgtattagtaattattttgatttttatcgttcaaatcattggtgacttctttgctaaaagaatgaatcaccagtctagataaaactatgatccaggaaaaatcctgggtctttttttggaatgaaattgaaaaagaaagcctttacaggtattataaatggtgattgataattaacgcaaaccttatagagcttaataaggaggaatataatatgagcgaagaagaataccgtgttgaaagtgacactattggtccagttaagatccctaaaaatgctttatggggccctcaaactgaaagaagccgcaataacttcccaagtggtgaattgatgccattgcaaattattcgagcatttttacacttaaagaaggcagctgcagaaagtaacgttgaagttggcgatgaaccaaaagaaaaaggcgaagcaattgaagatgcaattgatcatttgctagctttaagcgatactgacttgcgtaaggacttcccacttcatgttttgcaaaccggttcaggtactcaaagcaacatgaacgttaacgaagttgtagctaacttggctaataaattgcacccaggtttagatattttgcctaatgatgatgttaaccgtggtcaatcatctaatgatacttatccaactgcaatgaatattgttgccgttgaagcattggacaagttggaaccagcaattcaacacttaattgatgaattagttgttaaagaaaagaaatattggaagactgttaaagttggtcgaacccacttacaagacgcaacgcctttgacttttggtcaagaattatctggctatatttctgctcttaaacatgacttatcatatattcgtgaattgaagccaactctctacgaattagctattggtgggactgctgtagggactggcttgaatgcagcaccgggaatgaccgaaaaaattgctggtaaattatcagaagtctatggtcataaatttgaagttaaaactaataaattctggggcttagctcaccattcaggtcttgatgtagttcatggtgcccttaaaacattggctgctgatatgtttaagattgcgcaagatattcgtttacttgcttcaggtccgagagcgggctaccatgaattaaatattccagcaaatgagccaggttcaagtattatgccaggtaaagttaacccaactcaggcagaggctgtaacaatggctgctgctaaagtatttggtaatgacaccaccattacctttgcttctagtcaaggtaattttgaaatgaacgtcttcaagacagtcatcattgcatcattcttagatagttgtgatattttaactggtacaattactggttttgctgataaaatgattcatggcttaacggttaatgaagaaagaatggatgaattacttgagaattcattaatgaccgttactgccttgtcgccacatattggctatcatgctgctgctaagattgcgcaaactgctgataaagaaggcactactttaagagaagctgctttgaagagtggtaaagttactgaagaacaatatgatgaatggatggactatatgcaaatgactaatgttgataagtctactccagaagaatagggaaagtaagaaatgccaaatacaaaagaattaaagaataaatatgatgctatcgttgttggctcaggcggagcaggtctgactgctgcacttcaagctcatgaactaggtctaaatgttgttgtgcttgaaaaaaatgagaaaactggtggtaacactagtcgtgcttcaagtggaatgaacgcttctgaatctttggttcagcttgacgaagggatcattgataataaccgtgacttctatgaagaaactttaaaaggtggaggtttattaaatgaccgtgccatgttgaagtactttgttaaccactctgctttagctatttcatggttgatgaaatatggtattcgtttaactgatttgaccattacaggagggatgagtaagaaacgtgctcaccgtcctgcttcaatggaaccagttggattttatctaacttcacgaatgacaacacaggtgaaaaaagcgggtattgacatctttactggtgctaaagttaccaagttgttgcaagatgctaagaagcgcgttaatggtgttgaagttgagacaccagatggcattaaaacagttaaagctaaggtggttcttttagctactggtggctttggtgcttccaaggatatcattaagaagtatcgtccagacttagttgactataagactactaatcagccaggggctacaggcgatggactgaagcttgctgaagcacttgatgctcaactaatgcaaatgaacttcattcaggttcacccaactgcagatactgataatccgcatgtttatttaattggtgaaggtctgcgcggtgaaggtgctatcttagttaacaagaatggtcaacgttttgttaatgaattaagtacacgaaagattgtttctagtgcaattactaatttgcatgaagatggggcatacttgatttttgactcaggtgtacgggctcattttgctgcagttgagttttatgaccagattggtttagtagaacatggtactgatttggctgatttagctaaaaaaattggcgtaaatggtgccaacttagaaaagaccattgccgcttggaataagtccgttgcaactggtaaggataaagaatttggcagaacgactgggatggatcgtgaactggatcgtggtccatactttgcaattcatgttcatccagcaattcactatactatgggtggtattcatattaatactgaaactcaagtacttgatactaatggtaatgtaattgatggattatttgcagctggtgaagtatctggcggacttcatggaaataatcgaattggtggtaactcaattgccgaaacagttatttttggtcgtcaagcaggtattcagatggctaaatatgttcgtgaaagtaaataatataagaaagattatgtaaagagagcggttggttaactgctctttttcgatagaaataataacactggcgagattttgatgggatattataatttataattatggaataaatcgtgtctaatgaaagcgcttagtgtataattaatcatgtagataaaaaacagtttataaacatttgaaaggactaatttaacttatgagtagaaaagtatttcttgttggtgatggtgctgttggttcaacttttgcaaatgacttattgcaaaatacaattgttgatgaattagcaatttttgatgtagctaaggatcgtcctgttggtgattcaatggaccttgaagatattacgccatttatgggtcaaaccaatattcatcctgcagccgattatagtgatgctaaagatgctgacgtttgtgtgatcactgctggtgttcctcgtaagccaggtgaaactagacttgacttggttaacaagaacgttaagattttggaaagtattgttaagccagtagttgaatcaggatttaatggtgtctttgttgtttccgcaaacccagttgacattttgacgactttgacccaaaagttgtctggtttccctaagaaccgtgtaattggtactggtacttcacttgattcaatgcgtcttcgtgttgaactttcaaagcgtttgaatgtcccagttgctaaggttaactcaatggttcttggtgaacacggtgatactagttttgaaaactttgatgaatcaacagttgctggtaaggcactccgtgattactcagaaatcaacgatgatgttctagcagaaattgagaccgatgtgcgtaagaaaggtggcaagatcattgccaacaaaggtgctacattctacggtgttgcaatgatgcttactcaaattgtctcagctattttggacaatcgtgcaatttgtttgccactttcagctccgattaatggtgaatacggtattaagcatgatctttacttaggtaccccaaccgttattaacggtgaagggatcgaaaaggtaattgaaactaagctttccgatactgagcatgctaagatgattaactcagcagacaagatgcaagaagttttgtcaggtataaacctttaattgatcattaattttattaaaagccctagttgtcaaaaactaggactttttcttaatgacaaaaaagctagaaaatagtattatataagaaaagattaataaaaaattaaaagataagaattaacgaggtatatcatgacagttatttcacaacaagaaattgaaggcttttctgaaagctttaattctaatcctgagaataaagtagcttctcgtgctgctcgtcgtagtggtttgcttgaagcttcatttaatgaccgcgtatcagaacgacttaaccatgtcttttcaactgaacttgatattggcggtgtaactgatcagaagcattctggtcgttgctgggaattcactactttgaatgttttgcgccactactttggcaaggaaaacaaggtcaaggattttacgttctcacaagcttataatttcttctgggacaagattgaacgtgctaacgctttttacaatgcaattattcgtttggcagataaacctttaactgatcgtcatgttcaagcatggcttgagtttgccggtgaagatggtggcctttggaccatggccattaatttagttaaaaagtatggcgtggtaccttcatatgcaatgccagaaagctttaatactaataatactactgctttagccgaaaacttagctcgtaaggagagaaaagacgctcttgttttgcgtaaattagttaatgaaggcaagagggatgaagcagaaaagaccaagaaggaattcttgaacgaaatttatcgcatggtatcagttgccttgggtgaaccaccaaagaaatttgatttggaataccgtgatgatgataagaagtaccatttggagcgtgatttgactccacaagcatttgttcaaaaatactttaaggacttcaacttcgatgattatgttgctttgtccaacattcctaaccatgaatataacaaggtttaccacttgccactttatgacaatgtggctggcggcgatcaagtcaaatacttgaatgtgccaattgaatacttagctcaagctgcagtagctcaacttaagtcaggtgaagcagttagctttggtaacgatgtcttgaagcaaatggaaagaaaaactggctttttggatactgaattgtacaagactgaccaattatttgacgttgatacgcaaatgagcaaggctgatcgtttgaatactggtgagggctttgctactcacgatatgactttagtcggtgttgatgaagacaacggtcatatccgtaagtggaaggttgaaaactcatggggcgacaagtttggtcacaagggcttctacgaaatgagtcaagcttggtttgaacaatatgtttacgatgtgattgtgaagaaggaatttttgccaaaggaattgcaagagttagttgatcaaccggctgttgacgtaatgccttgggaaaactttggtgaataagatcaaaataacaaagatcaagtaaagtgtctgggaaaaaactaacccttagatactgaaagacgatcaatccaactcttaatttgagttgcttgaccgtctttttctgtctatttttatttttgaacaaagaaaattggtcttttgaccatcttctgttccaatatttgcttaaattcatcatcatgaaggctattcctatatctgtttcaaccttctttttgcctctgaaatgagttcggcgcatgccaaagacgttcttcaaatgtccaaaaatcggctccacatcatatttcctcatgctgtagatgtgtctgccttcaggactttggagaactgctttggctttttcttttaggtattgccagttaggattatagcgaacctgacgttggcgtccgctcttagtcttggctaagcgttctaattctggcgttagttgaaattcatctgcttcatagaccttaaaatcacgaacctgaccagtcgatcgatctttacgttgactataatatttgaagttgaatctgacgccattttgatcaaggtaataatcatctttttcatcatagaaccagttagccagcttagtcggatcgttgcgatgctttctggtcttttccttttcgtacatggtataaggaatatagtacttcttgtctgaatactcttcttctaacattgaataattatattcgctgccataaccagcatcagcgacaatcttgtcaaacttgtctagtgtcgtcatctgctttaaaaatggttcgaaagttctgaaatcagttggattagggtataaagcaaagtcaaccacatattgatcagtggtggcagcttgaatattgtagcctggcttgagctggccgttcttcatgtgatcttccttcatatgcatgaaagtcgcgtcatgatctgtcttagaatagctgttacgccctgcaaagatttctttcgcctcttcatatttcttcattcgaggaacatagtcttttcttagtttatgaagcagctttttaagaccgcgtcttcttgcttttctaggcgaaccgccagggattgctttgggttcttgctcaatttcttcggtcagcttttcaatctcggcttccgtttcttgtgctagctctgccaaaccttgactggtctggactttctcttttgccattgctttgacgacttctttggcaatcaattcatcataaagctcaaccgcttgacctttgagcttgtcatgaaatttttcaactgccttgcgccaaacaaaagtatagcgattggcgtcagcttcgattttagtgccatcaataaagatcgctccttcattgataaggccctcggcttctaacaaattggtaaagtagaggaagcttttcttaaccagctcattggcatgcttgctggatctaaagttattgatagtatggtaagaaatctgttggtgttcagccaaagccatcatcggcacgttttcttccagcattaattcgatttttctgcctgaaaatactcttctggaataagcaaaaagcaagattttaagcatcatcgctggatgataagctggacgaccggttttagcagtattacccaataagacatcttctggaattgaatcgacaaaccagctaatggtattagccaaatgattatgaggaatagcgaagtctaagttgagtgttaaagctgtttgacctatggtataattttgatacattaagattgccttctttctttttgttttgtggtgattcaataatatcaaggaaggcacttaaagtatagaaaaagaacgatgaaatccattaggaaatcatcgttcttttttcctgtctgagaattagttttttcccagacactttttttgcataattatttgagtttaaataattcaaaaaataagtaaaaaatcaaaataattcaaaatttgtaaccgcttaatctgttgataagtgtataatactaattgtgagttgtgatgagttttagtttttataaaaaggcttgtttaacaataacaagatagattagggagcataaagaggggagagctactctatgcctgtaggaaaaagaatttatttaaagaggcaaatgcctgatccaaaagttgtagctggttttaaaaagatcccagcttctaataccgcggattgcatggaacgaaattgtgctatgaatcctagaattaagttaatgtcgaatcctgatgaggaaatggttggtccagcatttacggttcacaccagggcgggtgacaacttagcaatttatgcggctttaaagtattgccagccaggcgatgtgattgtcatcgacgacgagggtgataacactagatctttgattggtgaggtaatgatgtcttacttacgcgatcaaaagaaaattgcaggtattgtaattggtggcccaattcgtgatattgataatttaagaaattggaaactgccgatttatgcaaccagtactaccccaggtggaccatataaagaaggacctggtgaaataaatgtacctgttgcttgtgggaatgttagtgttaacccaggtgatgtgattttaggggatgctgatggagtaatttgtattccacgtaaagatgctcctgagattttgcctaaggcacaagcttttcatgagcaggatgaggctaaagcaattgcctttagcaaaggagaagttgatttaagttgggtagataaaagcttagcagataaaggctttgacatcattgatgatgtgtatcgtccatagagaataggggattcttatgaaaactttagaaaaagtgaattataaaggctttatttggcctttgatcgttggaattgtattgtggtgtattactccatggcgcccaagtggcctttcggttcaggcatggcaaatgtttgccgttttcgttgccacaattgtagggtgtattacaaaacctttgccaattggtggtacaaccttagctggcttggtagtaactgttttagttggcttagcaccaatgaaggacgttacaaatgcaaaaggtatggtagttaatcaaggcgtgcttagttcatttggtaactctgctgcatggttaatcgctatggccttcattatggctcatggtattagtaaaacaggtctaggtaaccgtattgcctatattatgattcaaaaatttggtaagaagtcattgggtattggttatgcgattactggattggaattaattctcggtgccttaattccatcgaactcagctcgtacgggtggggtcgtttggccagttgttgaatctgtttcaaaagaaggctacgattctaagccagatgatgcttctcgtaaaaagattggtgcctacattgactttactgcctttcatgccaatattttatcaacggctttgtttattaccggtgctgctcctaacatggtggctcaacaattagccgcacaaaagggctatcaaatgtcttgggcaggttggtttttcactgcaatcgtacctgttgctgtattggcagtaatcattccatttgttatttacaagatgtacccacctgagattaaagaaactccagatgctaagaaatgggctgatgaaaaattagcaaaaatgggaccaatgtcaactccagaaaaaattatgatgtcagtcttcattctttcaattgttttatgggttttgtctagtttctttaagatcccacaattagatgcgacttttgttgccttcctggctgtaactattttgatgattaccggtgtgttaacaatgcaggatgctctgaaagaaactggtgcttggaatatcttgatttggctttctatcctgatgttcatggctggtaagctgatttcatacggatttattgattggttctccaaattagttcaaaatagtcttcatggtgttagctggggctttgtattggcaattctagttttgcttttgttctacacccactacttctttgcaagtggaactgcacatatgactgctctttatttgccattcttgtctgttgcggttgcaactggtgctcctttaggcctttccgcaatgcttttagcctttactggtgcaatcaacgcatcaaccactcactatgctaatggtcctgccacaattttggctactactggctatgttaaacaaggtgaatggtggaagatgaattttgtccttggattaatctatatgattatttttggaactgtcggagttctttggatgaagattattggtttatggtaaaaaaaagcaatctggaatcacccaatgtcattaagttaagacattgacaattaagggtgcttttttagagatcgaatcatttggattcgatctctttttttgtataaaataaaggcgaaaagaccagccttttcgcctatcttatatattatatattttaaaccttcaaaattattgccagaaagatggtgttaattatgaaagcccttcataagaatattctagaacgtcttgatcaaattatcaataatactggggatcatattcacgattttattaataatcctcatgcttttaccaggaaacgcactttagatgcagcgacagtccttaaaactacaattaacatgcaaggtcagaatttaaacagtgaactctttagagcttttggcgaagatgcaactaaaaagaacgataaagtagttagtacttctgcctatgttcaacgcaaaagccagctttctcctgcttgttttaaacatattctgactgtttttaatcaaaatctatttaatattcaactttttgatcatcactaccgtttgtttgccattgatggctctgactttaatcaaatctggaatccgaaatcgaataacattgtacaagcttcttctcataaaaagaaaccctattgtcaaattcacgttaatgccttatatgatctattgaataatacctaccaggattgtatttttcagcctaaatcagaaatggatgaacgcaaagcggctgttcaaatgcttaaagctttgaattgtggtccatatattgtaacaatggatcgtggctacactagtttcaatatgattgaaaactgcaatcgcctgcctaactgtcattacataatacgaactaaggctggacaaggcggagttaaagaaataacgacattgcctgatcaagaatgtgatcgtgagatttcctgcctggtaactacttctaactattactacatcacgcataaagccagtgagaatattcaccatgtccagcatcattatcgccaatatattaagtatcgctctaaaaatacccaggatctaagctgggattttggcgagttatgcacaataaaatttcgagcctgcaaatttagaattaatgatgccaaatcaggcaaagaagaatgggaagttgtgctaaccaatcttgatcgaaaaaattatccgctaaaaagaattaaagagctttatcatctgcgttggggtattgagacctccttcaagaaattgaagtattctttaggcagtgtacagttccattccaaacaagataaatttattgaaatggaaatttatgcccatatgattatgtttaatgcaatcagtcaaattgatgcacaggcctatattccgcaaaagcattgcaagtatcaatatgccatcaatttcaagcaatcatgcttgattattcagagcatgtatttggcttcttctttaacgcaagattttgaacggatccttattcagatcagctattataccattccaattagaccaggccgcaaggacaagagaaatattaagcccaaatcagctgtatattatttatatcgcgtagcttaaaaaagcagaatctgtgctatgccttatttgttgtacgaaaaaagcaccaatttaaccaattaaatgttaaatcagtgctttaaaagtctaatattaattgtcaatgtcttaacttaatgacattgggaatcaccaggttgctttttttgcgtcataatagaattgagtaatcaaaatgaaagaagattaaagatgaaatttaaaactaatgacgatgtaattttgcattataccgatacgggggatgaagataagcctgctttgattgggatcccaggtatagggggatcttgtcaaatgtggcaagatttaattgccttatttaaaaatgattatcgttttattatgcttgatccacgcaatcaaggacagtccgaacgaacctatcgtggacagcggattagtcgtcatgcagttgacttagaggagctattagttaagctcaatttgcatgatgtagtagctattggaaattctatgggggccgccaatatttgggcatatttgtcaatttatggcaaaggtagactaaaggcaatggttgatttagaccagtcaccaaagatgattgcggataagagctggaagtatggctttaaagacctaacttgggataattatcctgacatgcttaaatttgattttggcaaggctttttaccatcacattgatgaaaaaatgtttttggctgctaaaaaggaatatcaagaattcccatatgatccagccgaaaactataactgtttagttgaacatgcggagcaagattggcgtgacatgattttggatacgccggttcccatgctggtaattgctgggggaaaatcgccattttttaatccagaatttacccaagcgataaaaatgctgaatcaagatgttcaaacggcgattgtaccggaatgtgggcatttgcctcaggctgagcaaccagaaaaaacgcatgagattattgctgaatttttgaaaaatttaaaaaattaatagataaattgaaataatcaaactaagagagtaaactatatttgtgaaaacgattaccgaaatagcaaggtggcatatttatggataaagtcgttgatttgtttttaaacgacgctacaactaggcaaaaatgggaaaacttgttggaatcattggggttaaatgattttagtgaacgcgaagttaacgtgattgatcatactattgggctagaagatgaggaaggcaatttagttggtactggtagtgtggctggtaatgtcttaaagtatatcggagtcaagaatgatgccgatacgcagggggctcgctttaataaagtggttacagccttaacgcaatatttgactaatgatggaattttccattcctttgtctttactaaagcaaagtatgcaactagctttgagcacttgcacttcaatttgttagccaagacggatcaggcagcctttttagaaaatggaacgcctgatgtgaaggaatttgtggctgaagtgcccgaaatagcagatcaagagcataagaaggtcgctgcaatagtcatgaatgcaaatccgtttaccttgggtcatcagcatttgattaagatggctagtgaagaaaacgatttggtttatgtctttgttgtggctaatgatgtttctttgtttagctttgatgagcgcttcaaattggtgcaagaaggtactaaggagtttagtaatgtgaaagtaatctctggcggagactacatggtttcaccagctacttttccagcatacttcttaaaatcacctgacgatttaattgctgtacaaacggtgatagacgcagctgtctttaagaatcaaattgcaccaggactgaacattacccgtcgttatattggtaaagaaccaatttcaagaacgactcacttttataatgttagcctagcgcatgagcttggtcctgagattgaagtaatcgtaattgatcgcttggaaaaagacggtcaaattgttactgccactaaagttagacagctgatcaaggatggcaatttaaaagagatcaataaattcgtgccggaaacgacttatgaatttattaagcaaaacatgcagaaattgcagtctaaaattgagaaaggaatgaatattaatggaaattaaaaccacagcagttgcgggaacacttgagagttcagatatccaaatcatgatttcaaagggttctaacggcattgagattgaccttgaatcagaagtaaaaaaggcctatggagatcagattgaaaaggtgattactgacaccttaaaagcttatggcttagaaaatgccaaggttaaagcaaccgataagggagcactggattgtgtaattaaggctcgtactttagcagctgcacaacgtgcaaccgaaacttcagacaagccagatttggaggtgctctaaatgacatacgttaagaatcgtttgcgtagaaccatgatgtttgtacctggtaataatccagctatgattaaggatgctggcatttatggtgcagattcgattatgcttgatttggaagactcagtttcattaacggaaaaagatgctgccagaatgttggtctatgaggcaattaagacagtcgatttcggtggcagtgaaattgtagttcgtgttaatggtcaagacacgccattttacgatgaagatgttaaggcaatggtaaaagccggcgttgacgttattcgcttgcctaaaactgaatcagctgcaatgattcaaaaattggtaaaggatatcgaacattgggaagatgaatttgacattgaaaatggttctattggcgtgatggctgccatcgaatcagccaagggtgtcttaaatgccccaaaaattgcaaccgcaacgcctttaatgatgggcttggcggtatctggcgaagactatactgcagatatgcatactcatcgttatccagatggtcgcgaattggaatttgcgcgtaacatggttttacaagcagctcgggccgcagacgtatatgcctttgatacagtgttctcaaatatgaaggatactgaaggcttctatcgtgaaactaactatatccatgaactagggtatgatggcaagagtttggttaacccacgtcaaattcaaatggttaataaggtctttaatccaactaaagaagagattgagcaagctaagaatgttgaaaatgccattcgtgaagccaaagctaagggctcaggcgttatttcacttaatggtaagatgatcgataagccagttgtagaaaaggctaccagggttttggaaacagcgaaagcttctaacttgattgataaagaaggtaactacattggagaataaagtaaaacgcgaattaccagatgatttaatgaaaaaaatgaatttgaaaccatttgaaactactgaaattggtcatcctgaagttaagcgggttgctccaaaggtaagagttactactggacaaaataagattattgattcacttgatgaggtaatcaagaataacctgaaagatggtatgactatttcattccaccaccattttagaaatggggattatgtttttaacttggtaatggacaagattattagtatgggttaccaggatttaaccttggctccaagttcacttactggtgttatgaatgataaagttatcggagcgattaaaaagggagtaatcactaatattacttcttcgggtatgcgcggttcactaggtgattttgtttcacatggcggcttgaagaatcctgtaattttccgctcacatggtaatcgtgctcgttcaattgaagaaggcgagattaaggttgatgttgccttcttgggtgtgccagtatctgatcccgcaggtaatgctaacggtcaagatggggatgctgtcttcggctcattgggctatgccctaatggatgctcgctatgctaataaggttgttttattaactgataatattgttgattatccaaatacgcctgcgtcaattcagcaagatcaagtggattatgtggttaaaattgataaagtcggagatccagacaagattggttctggtgccactcgctttcccaaggatcctaaggaactcaagattgctcaaatggttaaccaggtaatcattaactctccatattacaagcaagggtttagcttccaaactggttctggtggtgctgcattagctgtcaccaggtacttacgtcaaagtatgattgatgatggcattactgcatcatttgctttgggtggtattactaaacctaccactgacttacttgaagaaggtctagtcagaaaagttatggatgtgcaggactttgataagggtgctgcccaatcaatggctaacaataaaaatcaacaagaaattgatgcttcttggtatgctgatcctcataataagggtgcagtggttaacaacttggatgtttcaatcttgtcagctttacaaatcgatactgacttcaatgttaatgttatgactggctcagatggtgtcattcgtggagccgtcggtggtcaccaagattccgcagctggtgccaagatgacgattattacagctcctcttgttcggggacgtaatgcgactgttgttccaagagtagaaactattgttactccaggttcatcaattgatgttttagtaactgaaagaggaattgccattaatccagctcgccaggatttagtggatgcctttagtaaggtgccaggacttaagatcttggatattaatgaattgcaaaaaatggctgaaaaacaagttggtgtaccaaagccacttgaatatactgatcgtacggttgccttagttgagtatcgtgatggtactatcattgataccattaaggaagttagggattagttcaaaacgaaatgtatgaataagtaatcacaaaggtgtcacgaaagtggcatctttttgtttttattaaaatgttaagttgtatttttgcaagaaacgttttttaattatttgtgcaaatattttattttcaagcataaatatttgcaaattctaactacgatgcagtagtaaagtcacatcgcaatatcggtcaactaagaagaaccagtgtaggtgaaatatctgcattggttctttgcgtaaaaaaacacctcgttttaagaacgaggtgcgcgtatacatatatttttctgagtaattttattatgacacaaattagattgattttcacttatttagactcattattttgttttgatgaatatttttgttaaagtgaactaatgctaatgattttttgaggggagataaatatggaaagttggttatttctagcattggtgctagttgtagcgttattgggtaaaaacatgtcattaattattgcaacgggagtggtaatggtgtttaaattattaccgtttactagtaaatggctgcctactattcaagcaaaggggattaattggggcgtaactattatttcggttgcaattctagttcctattgcgacaggacagattggctttaaggatctgattaaaacttttaagtcgccagctggatggattgccattttagcgggaattgctgtagctatcttgtcacgttatggtgttgatcaattagcagcggtgccacaggtgacggttgcattagttttaggtactattattggagtagtggttttcaagggtgtagctgcaggtcctgtgattgctagtggaatgacatacttagtaattacgctgtttaacctacatttttgaggtataattatgaaaagtgaggcgatttaatgattattgtacatgaaaatacgcaagagcgattagatgactatcttgaacaccgtttgcataattatgaaataatcacgccgccgattcctaagaaacctgagattgtcactcaagatgatcataaacagaaaaatcgaaaaccaaaaagggaccattaggtccttttaattttggtctaaataaatggattataaaatctaccatgatcaagttgccagagaccaaccacaattaataccaaaatcacggctgcgatcattacaagataatcagcttttttaaatgattgggtgacataccaggtccgttttttctttgagccaaagcggcgtaattgcatggctgttgaaattgtatcgattcgatccaaactggagaagataagaggcatcacgatattcaatgtccccttaattcgtttgcctaaactagcctttttggatagttcattgccacgtgcttgttgggcagctgagatatcccaataagaattttggatatctgggatgtagcgtagagctagagaaacagcataggaaattttgtaactaatgccgattttatttaatgaagcagcaaattgactaggattagtagttaatagaaacagcaatacgattggaattgagcagacatattttaagaaaagattgaataagtagaatacctcttgcaatgttaatgtgaagtagccggcatggatcaagatgcttttagaatgataaatattttcaccatagcttggctgaaagatgaaaacaaaaatcagatttagcaacatgaaaactacaataaatttcacgataaaagaaatctgactccacttaatttttgcctctttaaacaagaaaattgataaaatacagatagcaattaagaatctggtatcataagttaccatacaagcaaccgagactaggagcataaaaactaacttagtggttgcgtttaattgataaataaaagaatcaccaggttgataacctaaaacttggctttcattatgcatgtttttcatccctttctgcatcaatataggcgcggacaaagctatctggattttctaattgatatttgatagcgagattatataaggaggttcgcttcaaagcagcctttttaattaaagctttttcagttaataacttgattggatctgtgtcagcaattagtgttccatcagcaaaagccagggatctgttagtgtattccatcagcaagtacatatcgtgagtgataatcataattgttttgccttgatcattaagctgttttaaaaagttcatgatctcagtataagtttgccaatcttgccctgcagttggttcatcaagaattaataactcaggattaagcactaaaattgcagcaattgtgactcgctttttctgaccgaaggataaagcagagattggccagttgcggtacggataaagaccacaaactttcaaagtatcatagaccttagtgcgaatagtctgctcatcataaccacgtagacgcaagcctagagctacttcgtcaaaaatcattttttgggaaatcatctggttaggatcttgcatgacataaccaatcttatcggaacgctctttgattgaaaactgcttaaggttatcaccatcaaataaaataagtccctcattgtcgataaagccacaaataattcgacaaagggtggtttttcccgcaccattttgaccaactattgaaacaaaatcgccttgattgattgtcgctgtaacgtcatgtaaaggatgaatctgcaatttactataacggtggccgacgcctttgagttctaatagaggatgagtctcttctttttcaccacttagggtaatgttgttttgccattcttgcaactgcttagcaatttcaggatcttggggcaaagcagcgactgaagttaggtcgggaatacgcgtaaggtcgacgttagctttttttaaggcatttaaataaagaggactacgaacaccaacgtcttctaaacaattctcatgtaatagatcatttggcttcttatcagctacaatttcaccatcattaattaggataatgcgatctataggctgactccaaacttcttctagacggtgttcaataatgattactgtagcatttaattctttttgaatgcgatcaattaaagccatcgttttcattcctgaagctggggctaaattagcaagtggctcgtcaaaaagtaaaattggtgattcatcaaccatgacaccagctagagcaacaatttgtttttgaccaccagatagattttgtggcgcctgctttaataaatgctcaatccctaattcatcagcccagcgatgaacaacttgtttcatataattttgtggttggcagtcgttttccaaagcaaaagcaatgtcttcaccaacagttaagccgataaattgactgtcagtatcttgtaggatagttgaggtggtgaaagaaagatcaaataggttagtgtctttaatattattgccgttaatagtgcattcaccggtgatctcaccagtatctagattaggaattaggccgttaatacagcggccaatggtcgatttacctgaacctgatggtccagcaattaacaatttttcaccttgtttgatagttagattaatctgttttagtgttggctcggcctgactgtcatacttaaatgaaaaatctttgaattcaataattgttttaggcattgtttaatcctccttgcgcaagctgccttttttaatcttggttccagcataagctttaagtaggagcgtgccaatgaccataattgtaataccattagaaagcgtagccgaaattccttggacaaaaactttgttagcaggttcgctatagatgataatgtcaccgattggtgcaactacaatccaggcgagaatattggcaataatttgaatgatattaaaaaagattatttgtttaataccaaaaataccattttttaagtctaagcgtttggccgctaaaccgatgatccagcctaaaacagcagtagctaatacccagctccaccaagtctgcccgtacataatgaaatcggacaaagcatgtccaataaagccgacaataaaaccgaccttagcgccatagattgacgcaaaaagagccaaaaaaggaaagactaattcaatatttgtgttaggaataggcgtaggaatcgatgtgaaacgtgctaaaataacatagattgccgatccaattccgatcgctacaacatttttaactgataaacccttagtatgcatatttttctccaaaatttagtatatttacaaggtataattagtaagcggtaacagtcaagctgattgggagatccaatctatttaataaatttgtagaagaattgctaagagggtatccttatattaaagaaaagaatttataaattagaggtaaaaaatgaagcaggatgaattaaagaaaattaaccatgaaataggttcgtatgttgctaaggtaaccaagacaatttgggttgacgataggacattgcagattgccacaatgatgattgattcttatggcgataccgtatatgtttgggttgaggaagccgatgatcattgccgcgttagtgatggcggacgaattctatttaagctagatcctaatgaggaagataaagagttatatgaaactgcggaagatattgcgctagggtcaggttatgaatttgatgaaaaacactgtgaaatttttgttgatgttgatcgcaagaatgtggctcaggcggcaatgaagctggcacaattacaagtagcaatttcatatttaggctaaaaaaagacatccctaagttttctttgattagggatgtcctttatttttaagtcatttcgaaaaactttagacatttgccatccttcctaggttcacatcttgtggctttttaccattgaggtcaaaatttgcaattgcttgtgctaaagccatcattgatacaacatctggaatacattcatcaattctaaactccataatgctcacctcccagtcattgtaaatccaactttagtaattgttaaccagtacataaagataaagaaggcagaaataatattaacaatcacagcaggtaaggctagagcagcggtaaagccatatagtgcattaccaattactcctaaaattggcccaattggtgagatattcatgttatgcgattgcactactgcaacggcattaaggatcacgccgaaccaggcaaataagtaaaatattaaagctattctagcagtgaagtcagctccaaggatggcaaaccaagagctaatgaataacacacaattgatcaggttcagtgcaccaatccataaatcatatttagattttttcattttttctcctcattataaatagtctatctctgtattactttagcgaattaatcgatattttgcaaaacgcgttgggcaattgcatcattagttactagatgagtaatgataccgctacgtaaggcgccaaggagtgcctcagatttaaagcgattgcggacgacacaaaaacgaattggcgttttcataatgtcattcatgctgataccacaaatgtgttgttcgaagtcagggaaaaattcacctttaatattatatggtcgtcccatgatcattccagctacatcgcagtcaggaatgtctttaaatagttcaggtccataattttctttcaaaaattgattagcttgaaatgattggaaagtactaagaccagtgaaaagcatgtctaagtgatgataacaattttcaattactttaaaataaggctcatgtttcaaggcaggcatgatctttggatttagtatataaagtggggttggcagacttagactatgggaatgcaatttttctgctgcatcttgggccaatggattcttcctgcggttagaattaattggttgaccaagtaattgaataaagtaaagttgctctaagtcctgctcaaaaaagtcgttgatcacgccatgcattgttgcaccccaactaataccagcgatttttgcttgctttagataggtttcaatttgtttagcagcgaagttaactacggcttcactattttcatcgcggttgccggtagtttcgacaataaaagcttcttttaatctgaatcttttctgaaattctctctctagtacctgattgcgtttgattccacgcgagattttaattttaacaattccacggttacgcgcgtcttctagtgctttagcgattaaatatcgcgataaatcatatttttgtgagatatcagcaatattaagctgactaaggtaaaagtcatgagcaatgttagcaagttgttcatcagttaattgagccactttaaatcatcctttatttcaaaataacttatatgtctattataaatttaaaataataaaaaggagcagcaaattttaaaatatcaaaaattatgatgaagttcctgtggtagaatataatggttataattatgcgaactatgtgagggaaagtaataatagcatgagtgaaattgatcgagaacatcatttatcagaaaaacatcatatgaagattctgtgggaggaatttttcaagagcgataataatacgatggcgcaggatgcaacattagttgaaaagacctcgattgtaggtcgagtaggtattatgcttttaagctgtggtacaggtgcttggcgagtacgtgattcaatggatacggttgccagaaccttgggcattacctgttcaacggatattggattagtgtcaattgaatatacctgttttgatgttgataatgaatcatattcccagactttatcgttaccagcaacaggtgtgaatatgactaagttgaatgaaatggaaaaattcgttcggcaatttgaaaagggacatggggaatggactatcggtcaaattcataaacgcttacgggagatttctcagcaaaagtcagcgtattctccgttaatttcgggacttagttcaggcttggcctgcggcggctttattttcttattaggcggcggtcttcctgaggtgatctgtgctttcttgggtgcagcttgcggtcaatatattagagcaattatgggtaagcacaggttaactttggtagccaagattgcggttgcggttgccatagcctgcagtgtttactttatgagttttcatgtaggagaaatattattccacattaatcatgatcatgcctatggctatattggtgccatgttgttcgtaattccgggttttccatttattacatctggattggacatgtctaagttagatatgcgctctgggcttgaacggctgacttatgcgattttaattatcgtaattgcaacgatggcaggctgggctgtagcaacaattttgcgtttgcatccaggatctatgcctaagttaaaaattgatccagggactttaacctgcttgcgattgctggctagcttttgtggggtgtttggtttttcaattatgtttaacagtcgaccacaaatggcagctacagccgcggtaatgggagcaatggcaaatacattacgtcttagcttggtcgattatgctcaggttgctccagctttggcagcatttattggtgctttaacagctggtctattagcaagtattgtaaggaaaaaagttggttttccaagaattgcaattactgttccatcaattgtaattatggtgcctggtctttacatgtatcgagctgtatttaactttggaatcacgaatattaatatcggagcttattggatcgtagaagcgttgatgattgtcgtggccttgctattaggtcttttagctgcacgtatcttaactgataagaagtggagacatgcagattaaataaattaaggtagaaaaaagagacggattttttgtctgtctcttttagtttgctattgttaattaatcatgctttctttttgtaatagtaaatcccagtagtcctagtgctgctaaagctagaccgattaagctcaggttagaattattttgactagtttgtggtaatttagaactaatattattgtaagacttaacgatattattagtagttctagtctttgttgttgaatttggaatattattaatggcagttccatggggtggaataattccatctttgtgttgcttctgtctttgcatatcagtgccataaggatgactgctagaattccaatttacttttttgtgaatctttgtctgtttgtattcattagacttaggtggttcagacttatttggctcagaaggctgcttcggttgttctggagtagtcggagtctcagattcaggtgtaggaataggagttggggttggttccggtttagaagcggagtaactatagggtacccaaatgctaatagttgctagattgccagttgttgttttttgaccattaactgtggtagaagcaattgaagctaaaaactccgaattaggtgcaattgcggaaatcccagtaattgaattgcttgtagcagtacgtttattctgtgaagaagcaatgtgaaccacgccatttttatctaaatgataatggccatcaattatgtctttaattgtagtattgttatacggaatagctgaaaatgcttgattgtttgatattcattgtgaccagtttgtttctgtgccttgcggatccttaactaaatcaacaaccctgcttctagagtaaataacttcttttactacatttggagtaggtgtttcatcatttttaggaacagccacatctggattatttataccggaaaagttttggctcttaagaccgtttacatagtagccttttacttcttccctaactgtagcagtttgcttttctatctgcgtttcatgaactaagtaaatgatgaagtgttgatctacattttcattattatcaaagttgccaaagccgatactgctgtccgtttttaatgtggcattggcgccagaaactttttcaattttatagtgcttatttttaaataaagctaatgcttcttctaccctgctaaattgaataggggtattagctgattggtcgtctttattttggtaatcagcactaagcccttgaccagcttcatcactagtcattgagagttgaaacccattatcgttaagtagtttattgattgcttgatcggttttatcagtgtcatcataaaatctgacatctgcatgttgagttatgtagtagggaatagttaattcatagtgagtaccgtctggagttgatgaagcaataatgaattggtgttgattattgagtctaattttatcaggagtaacaatattaactaagtctgctacatattttgcattagcgtttttattaggagaaactgtgacagtatatgcttgggctaaagcgttccaagttttgccattatcaatagaatattgagtccagctttggcccgaatcttcagatttaagtttgagcatgacttcatcagatgcaaatggagtgttagatttttgacttccgttagcgtagatatggttaattacgtagctaatagttttagtttgttcagtttcactgtcagaactacctttaatttggccgttccatgagaatgttttggtctctttaagcaatccttgaccagccattaaagaagctgattcatctttttttatttcggaagcgttgttacctttttcatctgtatgaaaagcggtaatttcgactgtttgttgttttgttttttcttggtttggtgaatctttagctgaactttgattattttggttacttggatcagcttgagttgactggatggtattatttgactgttcttgattagatttttgtgaatcttgttgagtttgttcttcattagtcgcagtattagtatccgcatgaacaagttgactattacttaagaaaaaagtagtgctaagtgcaactgcagctaaaccaacagacaactttctaaaaccaaatttttgttttccattaaattttgtattgaagctcaaatcatttttgtgtttaatttatctaaaccttcttttgggaacgtaaaagactgagtcttttacaatttattatcaatgtgttctttttacatttgacaacatattagattagcacaaataaataacattgctgatataaatttgacttttttataggcaaaaactttctttttagtataaatagtttagccttatatattaaatatttataatttgataataaataactattatatagaaaataaaaaatggcatgatatcaaaccacgtcattttaaatctgttattattttttcgctttatttacttggcaattgctaatgccgtaacaacaaaggcagcgatcatggtaactacaaagccaataattcctaacaatatattcatttttgtcatcttcttctatgtaattgttatattctgtatgcggtacatatatttactataacacaaaagaagaagaataacgcaataaattgtaagcgctttttattcttttagatcaataaaaggagcatggcagaatttggctaagtcttctgggttcaaaaagacactgcggccaacttcaccactagaaacaccaatttcaggatttccttgcatagagtcatccaaatagataggaaacttttccttaaaataaattccgataggagtattagcgccatgtacataaccagttgttttggctaatttctttaagggaagcatttcacattttttgttaccagaaactttagctaattttttcatgcttaaatgttcagtaactggtacgacaccaaccaatggaccagttttatttccttcgcagacgagagttttatagactaaacgctctttgtcttctaaaatagaagtgtttatttgtgcaactccgcctttatcttcggagacagcaaattgagcttgacgatacttgattttattttggtctaagattttttcgaccaatgttttttcgagtttgttctttttatttttcttctttgacatatttatcacctgttatcatgatagcattatgccaagaaaatcccaaaggagataatattaatgaaattactaattattaaaattgatactagtcatgaagttgaagacgctttgagcgtttttgctttagataatctgaatgcattgggtattgaatcaagaaagcgtagcgactttgagcaagcaggctggttgcatgattctactgtagttgaaatggatgacattaaagacttacctaaggatacatatttctatgcttattttgatgaagaagcagataaagacgcattagtaaaaaaattccaagataagttaaaggaattgaagagctatggcctagatgtaggggatgccaaaattacaacttcatacattaaggaccaagattggaacacggcatggcaaaagtattatcacgtgattgatttttcacgtcacttggcaattgtgcctgaatgggaagattacaaacccgcttttaaggaccagcaattaattaagcttgatccaggcttagcttttggtacaggaaatcacaaaactactcaattagcaatgatgggcctagagagagcaatggttaagccaatgaatgtagtggacgttggtacagggtccggtattttggcaattgctgcatcaaaattaggagcaactgacgttttagccacagatatttcagatgaatcaatgactgcagccaaacaaaatgcagccttaaacgatattaataatattcacactcaaaagactagtttgttagctgatgttaaaggcaagtttgacatcattgttgccaatattttggcagaaattttactagacttgattccacaaatggatagtcatttaaacgacgatggtcaagttatcttttctggaattgactacctgcaattgcctaagattgaaaaggctctagacgagaatggctttaaggtcgatttaaccatgcgtcaaggtcgctggattggactagcaattactagaaaagaaaaataaatatggtaaaatattatcaattaaattaaactttgatgagaggcacaatcttttaatgaaaaaactaggaaataaaatcgaagcaattccaattgtcaggaagttgaattctcatcgctggatgtcacttgtctggtggagtattttggtaatgattttgccgtatatctttagcatttgccgtgtgccggtagtgtggcgagaagcaattctgttttttattattaacagcatcattgcataccatctaggcaatttatttattaaacttaacctgtccaagtggtggattttcttgttacctgtgcttttctgcttagcaatgttgccacattttgctttgtataatttaatgtttggtttaatttacttaataattgaagcttttggcttaatgaataaaaatatttaccgctagaggggatgatcataatgtccaaatacattgaaatgacgcatgatcaggtaattgatacctgcaaaaagtatatgaatgatgaccaggtggcctttgttgaaaaagcatatgaatttgccaataaagctcatgctggacagaaacgggcgtctggacaaccttatattattcatccaacgcaagtggctggaactttagctacattaggcttagatcctgatacagttgcagcgggctttttgcacgatacagtggaagataccccagttacaaatgatgagctgaaggaaaaatttggtgaagatgtagcttttattgttgatggtgtaaccaagttaaacaaatatgagtacaagtctcatcaagaatttttagctgagaatcaccgtaaaatgttgattgccatggctcaagatctacgtgtaattatggtgaagttagccgaccgtttacacaatatgcatactctgcaacacttacgacctgataagcagcggcgtattgcttccgaaacaatggatatttatgcaccgctggctgatcgtctaggtattgggacaattaagtgggaactagaagatatgtctttccactacttaaatcccgaagcctattaccgcattgttaacttgatggatgtcaagcgaagccagcgtgaaaaatatattgccgatacaatcaagactttgaagaagactctaaatgaattaggcattaaatatgaaatttatggtcgtccgaagcatatttattcaatctataaaaagatggttaataagcataaagattttgatgagatttatgacttattggccgtacgtgtaattgttaaaaatgtgcgtgattgttatgctgttttgggtgctgttcatactgaatggaagccaatgccaggtcgttttaaggattacattgctatgccaaaggttaacggctatcaatcactccatacaaccattattgggcctggcggtcgtccactagaaattcagattagaactgaacaaatgcataaagtagctgaatatggtgtggctgcacactgggcttataagcgtggcaattttactggtgttgagcaaagtacctctggtgaaaagctggatatggtaagagaaatccttgaattaaaggatgaaactaaagatgccggtgaatttatgaagtctgttaaaagtgatattttttcagacagagtttatgtttttacgcctaaaggtgaagtatatgaactacctaaaggttcggttacgctagattttgcctatgcaattcacactcaagttggtagtcatgcagtaggtgccaaagttaataacaaattagttcctttggactataaattacgcaatggcgatgttattgaaattatgacacagactaatgcagcgccatcgcgtgactgggttgacatggtgaagacttcaagagcacgcaacaagattagacgctacttcagaagtcaggatagagaagatagcatccagcatggtgaacaattgattgctgatatgttgcgcgatgaggatctttcacccaaagaatttatggccagggatcgaattgaaaagctattagagcactttaattatcacactgcagatgaactatatgcggcagtaggctttggtgatctttctgctcaagcagtggttaatcgcttgacggttgatttgcgccgtgaggaagaaaatcaaaaacaaaaagagctggaagaaaagattttgaattctggacaacaagcagttcaagaagaacaacctaagaagaattcaaatactacaatgaaggttaagcataaaaatggcgtcatgatccaaggcgttagtgacttaatgcttcatttagctaagtgttgtaatccagttccaggtgacaagattattgggtatgtaactaaaggtcgcggtgtaactattcaccgaacagattgccgtaatatcaccaaagaagctgaagaacaaggccgcttaattgatgttgaatgggaaaatgttgaggaaaatagtgttcaatcctttaatgcaaatattgaagtctttggttacaatcgttccaatctgcttagtgacgttattaataagttgaactcacttactaagaatattaataatatctctggtaaagtaaacgaagataatgttgcacatatgtatgtcacagttgctgtacgggatgcagatcaactagatgaaattttgagtaaattacgtgatattccagacgtatacgaaactaagaggtcagataattaatgcgagttgtaattcagagagtaaatcatgctcaagtagatattgacggtaaaactgtgggcaagattggtaaaggctttttattattagttggcatcaaaaatggtgatgaattgccagtaatcaaaaaagcagctgataaaatagctaaaatgcgtatttttgaagatgaggaggggaagactaacttgtctttaaaggatgttaacggagaaattttgtcggtatcacaatttacgttgatggcaaatactaaaaaaggcaaccgtcctagttttgttgatgcgatgcgtccaccaagatcgaaagaactttgggaagactttaatcaagaactagaaaatgacggtttccacgttgagactggtgagtttggggctgacatgcaagttagtttagaaaacgatggtccattcacgattgtgttagatctttagcgaaaaaatgagaccgcaaaggttgacaatgtcttgagaaaaatataagctaagtaagaattatcgatgacaaagaatgtggattagcaatgatctattcaaagagactgctcgttgtggtgagagagtagatagatcgcggtctgtgacacctttaacagataatggatcgtttggcgagcgttaatcgcagcaaccaaaaaggtggtaccgtgctaatctaagcgcccttgattaagttcaagggcgctttttatttttaatcaagttatcaaaatataaaaaggatgattaaatgagagttcaaaaacctaagggaacagttgatattttgcctgatcaatctggttcatggcaaaaagttgaagaaactgccagaaatttcttcaatcgcgcaaattatcgtgagattcgcacaccaagttttgaaaattatgaaatctttgctcgttcaagtggcgatagttcagaaatcgttgaaaaacagatgtacgacttcgatgataagggtggtcgccatattgcccttcgcccagaaggaacagcaggcgtagtgcgggcttatgtagaagacaagatgtatgcgccagaagttgttaagccatttaatgttttttatatggaatcaacttttagatatgaaagaccacaagccggtcgtcaacgtgaatttcaccaaattggggtagagagctttggctcaagcaacccattaagtgatgtacaaacaatcatgatgggacatgatttattgggtgagttaggcgttaagaattaccaacttcacattaacactttggggaatgagcaagtacgtcaagattatcatgatgctttggttaattatttcactcctttgaaagatgagttatcagaagactcacaaagaagattgcgtgataatccattgcgtattttagattctaaagatgaacgtgataagaagttcttgcctaaggcacctaagattcgtgaatttttggatgacgattcaaaagctaattttgacgcaatcttgaagatgttaggtcaacttggtattgattatgtaattgatgatgatctagtacgtggacttgattactatactggaattatctttgaatttatggttgaagataagagcttatgggaaagtgcaactactattcttggtggtggtagatatgatcacttggtagaagaattcaatggacccgctactccagccgttggtttcgggattggcgaagaaagattgatgttagtgcttgaaaagcaaaatcctgcattattcgagaaacgcggtattgatttctttattactaatattggtgacggtactgcacaaaaggcaattgaaattgcacgtagccttcgtaatcaaggttttgaagctgactttgatgtcaatcagaagaagttaaagaaccaattcaagaaggcagatcgtgaaggtgctaagtatgttattactttaggtgaaaaggaactggctaacggcgttttgaatattaaacgtttagctgatggcaagacaatcgatttaagtcttgaagatctaaataacatgactaaaataatggatgaattgaaggactagtaacaatggaaaagatcgaaaaaagaacagattattgtggcaatattactgaaaaatacatcggtcaagatgtaaatctctatggttgggtacaacgtgtacgtaacttaggtaacttggttttcatcgatttgcgtgaccgtgaaggcttggttcagatcgttgttaacaaagattctggtaagaagttaatggatattgccgattcacttggtaatgaatatgttgttcaagttaaggggaaagttgttaagcgttcagaagttaaccctgacatgaagactggtcaagttgaagttgatgcaactgaaatcattattttaaacaaggctaagaaccctccatttgaaattaaagatggaattgaagtctcagaacaaactagattaaagtatcgctatcttgatcttcgccgtccagaagttcaacaagcaattattttacgttcaaagattttgcgtgctactcatgaattctttgatgaaaatggttttattgatattgaaactccaatcttaggtaagtcatcacctgaaggtgcacgtgactacttagtaccatcaagaatctatccaggtagtttctacgctttgccacaatcaccacaactgttcaagcagcttttaatgggtgcaggatttgacaagtattaccagttagctcgttgtttccgtgatgaagacctacgtggtgaccgccaaccagaatttactcaaattgatatggaaatgtcatttgctgatgaagaaactattcagagttatactgaaggtcttttgaagaaaattatgaaagatgtcaagggcattgatcttaaaactccaattaagcgaattacttggactgattcaatgaacaagtatggctgtgacaaaccagatactcgttacggtatgttgattcatgacttaagcccaattttcaaggatagtgactttaaggtcttctccggtgcaattgctgatggcggttttgttaagggaattgctgttaaaaatggtgcaaaagaatactcacgtaagaagattgacaagaaggctgactttattaaacgtttccacgctaaaggtttggcttgggttaaatttgaagatggcgaattttcaggccctgttgctcgcttcttgactgatgagaacaaagaagctttgaagaaggaatttgatcttgaaggcggcgaattagtagtattcgtaactgataagtggaaggtatgttgtgattcacttgaccaccttcgtcgtgaatttgccaaagaaactggtattgttcctaagggtgtttatgactttgtttgggttgttgattggccattatttgaatacgatgaaggacttggccgttgggtagcagctcaccacccattcactatgccagatgatgaaggggttaagttgctaactactgaacctcataaggctcacgcacgtagttatgatattgttatgaatggtgatgagatgggcggtggctcaatccgtatccacaagcgctcaattcaagaaaatatgtttaaggcacttggtttcactaagaaacgtgcatatgaacaatttggttacttgatggatgctttggacatgggcttcccacctcacgcaggtttagctatcggtcttgatcgatttgcaatgatgcttgctgataaggataatattcgtgacgtttcagcattccctaagaatgcttctgcttcagaaccaatgatgcatgctccagctccagtagctgatcaacaattagctgacttggggatcgaagttgaggaaaagtaccaagacagtgtaaaggcaaccgaagagcgtcttgaaaagatggctgctgaagatgctgcagaaaattcaacttgggataagtaataaatcaatataataaaaaataagtgatctcgctttaattgagatcacttatttttttatctgaattataaattattaacgaaattactaatccgagctaaactttcttttaattgctcagttgatgatgcataagaaagacggacataaccttcaccgcccttgccaaagtagcgaccaggagtgacaccgacttttgctttttgagccagctcaaaagcgaattgttcatcattggtgccatatttttcggggatcttagcaaaaatgtagaatgctccttgcggtgtggccatttcaaagcccaacttttctaagccagattgcataaagtttaaacgtgcttcgtagatttcacgtgcttttttaggatcgttttgaccattgtttaaggcttcgacagcagctatttgaacgttatcagtaactgaagtaactaaaaatgaattaatcttgcggatgctcttcatgatttgtttaggggcagcaatatagcctaaacgccagccagtcatagcataagccttggataaaccggaaatcaaaatatttctgtcagggatgtattcagaaagtgagtgatgtttggctttgccataaacaagttctgcataaatttcatcagttacagaaaagattttgtattccttaatgacatctgctaaggcttttagagctgtggcagaataaacgcggccagttggattagaaggatcagttaaaataattgcctttgcacctttaccgcgaccattgagaacatgacgtaaatgttcagctgttaagatgaagtcatcttttttagtatcgacttgaatagggattgctccagtcattttaattagctgaaagtataaagcccaaaccggagtaggaaccaaaattttgtcaccggggttaagcaaggtcataaagacatcatttaatgcacctgttgcaccgacagtgacacagatttcactttttggatcataatgtacaccaattgagcggtcaaggtaattgctaatagcttcaagtagttctggcttaccagcttgaggagcataatgggaatcattagcctgaatatcacgaattgcggcatctttaatatgatcaggtgtcgctaaatcaggttcaccaatagttaacttaataatcccagaaatttcagagaccttttggtcaaatgctcgaattttagatgcggtcaagttgtttagtctctcattaatagttgaagttaaatcactggataaatttggcatatataaagttcctttctgtattatataaattttaaattactcattaatataaaacaactatttttaaagcaacttgtaaattgaacaaaaaataggaaactgtcaaatcttttgtgtaaatagttctttctcgtaaattgattttttaattatttatttaatcaaagtaggattctaaggtgtcctgaacctgaccaaagcctttatgaattcgattgaaataacggtcattgtagctcattgcctgaataccaataaaagcatcaagcgactgttcagttggaaactctgccttaggcttagctttgcgcttgatcacattgttaaatgattcaatcatgttagtcgaataaattgaagctctgatctgcttgggatagttataaaagaccagcagatctggttctatgtctttcaagcttctgataacatggctgtaaaccttgccccatttggtatagaagtcatgcaggacagctgtggcttcttctttgtttgtctgttgatgcacctgtttgaattcgttcatgatcttttcacgatcgtcgacgcgtactttagcgcagatattgcgcatgacatgaaccaaacagcgttgaaaatgagctttaggataagtcctggtcaaggctgttttcatgccaacaacaccatcagaaagaaaaagctcaacttgctttaagcctcgggatttcatgttttgaagcatatctgtccagacttcaatgttctcgctaggcgcaatgcagtagtcaatgacctccttgtgcccattaggcttgatgccaatggcaatatagactgcttcacgctcaaatgtttctcgatgcaaaggaaggtatgttgcatccaaatagatgcagaaaaacttgtcgcttagcttgcgcttgtgataagcctcaacctttggaatcatctgcttggaaatatttgatacctgagctggactgtaatggctgccatacatcttttcaattagatcggctatttccctggtggtcacgcccttggagtaaagcttgataatcatgctttacaagatatccgagtgctgcttgtagtcaggcagcgtgtgctgatgaaattgaccgttgcgatcccgaggcacttgcacttcaattgggccaaattgcgtatcaactttgcggaaataagcaccatttctagagttgccagtattccagccatttctggcatagggatcatagcccagaaaggcagtcaattcagcttctaacaagttattaacagcctgttgtagctctttgcgcaataaattatttattttgtctggattgaatagagcttgagcaaaatctttggtaaaatcattcatgaaggagttcttctttctgtatgtgtttttttgttcaaaccaatcatacgagaaaggaactcctttttctaatgtttaaagaaataaatttaaggaatcattcatccttacacaaactattttacagtctcaaaaatagggaagatgaaactaatcatttccctatttgtttttaagaacagtattcaaattagtataaattgctggcttaggctgagatttatctggcatttgcagccaatgaggcaaaattccatttaaaggttgaagtggccttttagtgggctgatgcaactcaagcttcctatcaacaatcttgattgtagtggcacttttatcacgtggtacagaggatgattgtggtttagtgcaggccgataagctaagtaagaatatagttagtaaaagtagtttttgcatatttttcaatttttcctccaaatataactcccaacacaatattctactatttaagcctgaattgtcaaattaagtgcaacagttaggctatgaggaaatatattgcttgaagagttcttctgctgtgtgatattgaaggattcgacgatgtttgcggttaatggcatcagttgcctgttgaacataagcagctgacttatctttcatgcttttgcctttagggaagaattgacgcagaagtccattgcagttctcattggtgcctctttcccatggagaatatgggtgggcgaagtagatctggcagcctttgatctcggtcatatccgcaaactcagagccattgtcaaacgtgatcgatttaaaccaggcaggatgtctgtcaatctcattttgaagcagcctttggcatgtgcttgcccgatagtcaggaatcttgataactacttcaaagcgtgtggttctttcggtcaaagtcattaaagcaggctgattcttgcgtctgacgcctttaaccagatctccttcccagtgcagcggcgtttttctgtcttcaatctctttaggacgctgttcaatggaattgccaagatgcttcttgtgcaaagcatgaccgctatggccgtgatgacgcttgttcctgcgtcttttgagcttcataggcagatcaatattgcttatgtccagcaagccctgatcaatatagcgatagacagttggtgtgctgggacaagggtagcctggcatagtccttttgaattcaccaacgaattcatcgatgctggtggcatcaaatttagctttaaagcgtctggagagcattctcaaaaagacagcataatgcttcaatggattgcgctgatagcagtttttgcgacgcttctcataataaatctgtgcagtatcagcgtaatagtgctcatacaataaatagctgctgtctctttgcaggacacttccgcgtttgatttcgcgactgattgtcgacttatggcagccgacttcttgagcgataacagtacgggaagttatgccggaatccagcattgcttgaatttgtccacgttgtacgctggttaattgatgatagtgcttagaaatgctagaatttgaattggtcataaagatcttcctttcttgatttttcgtcacttcaagtttaggtcttcatggcctttttgtttaacacttagtgttgcacttcaattttaaatccgggtctactatttaagtggacaatgataaaataaaaataagtttagatgacgaggaatggtaaaatgagtcgaataacaatttatatgacaggtggaatcgctgattataaggcagttaacgttatccgcgatttagaaaaagcgggtcatcaagttcaaatagtaatgactaaaaatgcagagcattttgtaactactaatacactggcagctttaacaaagtatcctgttttggatgatttatggagcaaggaaaatgaggctagcataccacatgttcatctagcgcgttggacagagttagctctggttttaccagcgactgcaaattttattgctaaaatggcaacgggaattgctgacgatgcagctagcactacaattttagctacaagtgcacctaaattggttgtaccagccatgaatgaccaaatgtggaataatccagctacacagcgaaatatagcttttctgaaagaacatggtgtagaaataatggagcctgcagtagggatgctggcagaaggctatgctgctaaaggacgaatgccagagccaggagcaattgtggcgtggatcaaaaatttcactgaacaacagaacgttttgcaaggaaaaaatattgttattactgctggtggtactgaagaagcaatcgatcccgtccgctttattggtaaccgctctagtgggaaaatgggcatttccttagctacagaagcagcagcgatgggagcgaaagtaaagctaatatatggtaatgtaagtatgcctttgccacaaaatcctaggattacattaattcatgtttctagtagcgaagaaatgttagttgcagtcaaaaaagaatttaagcatagtaacgttttaattatggctgctgcagtagcggattggcgcatgaaacaagttgcagatcataaattaaaaaagcaagctgatcaacaaactttgactctaactttagttaaaacgacagatattttacgcgaagttgctagccacaagcagcgagggcagatagttgtcggctttgcggcagaaacgaataatttgctacaaaatgctgcaaaaaagctatcttcaaaaggtgccgatatgattgtagcaaatgacgtttctaaaaatgtttttggcaatgatgaagaccaggtaacgattttacaaaaaaataagtcaactaagaaatggcctaaaatgagtaagcgaaagattgctcaaaaattgttgcagcttattgctcaaaaaatatagtatttgcatatagctaatagtgaactatatgatttatattgctcttgtaatcattttgtaatataacatctagactttttaaaaatgtgatgaaaactataatgtgaaaactaaaaataatatttagtaagtaaaagatgttttttatccttgtttaaatgataaatgctggtattataggtgttgggaattaagagactgaagagaaagagttgataggacatcatcagccctttctttttttatacgaaaatattaattttgtatagaataataaaataaattatttgataatctttataaacctagcagcattgattgatgctactattttaattagaaaatataacagaaccacaaaaaataaaatgtatgtataggatttgcaacaattttgttgtatgctattaacagatggctgaaaaaaacaattattgtttaataattgttattagctatataaatacaggaattaagaaacagagacatattagtaaaatgtagaggtgtatatatgtactctgataaaactttaatgctcaataacggagtagaggttcctcgaattcaactaggaacttggctaattaataacgatgatgtacgaaaagtaattcgtcaagcgattaatgttggttaccgcgctttcgacactgctaaagactatggcaatgaaagtggtgtgggaaaaggtatttggaactctgatgttgagagtagtgatattttttaacaactaaattaccaacttcgattaaagactatgaaggtataaaaaagcaattgatgacgctttagatcgatttagtttggaatatattgatatgttgttaattcattcaccacaaccttggattgaagtgaatagaattaatgatcgtcactttgaaggcaatctggaaaactggagagcaatggaagaagcacttaaagccggtaaagttagatcaattggtgtttcaaattttttacaagaagacgtagctaacattgttaataacagctcaattaagccagtagttaatcaaatcgaagttcatataggaaatgtgccaactgatttgatgaaataatgtaaaaatttaggaattcagattaaagcatattctccacttgcacatggtcgtttgttaaaggatccaagaatcaggacttacgctgaaaagtatcatgttagtccagctcaattaatgttagcatttgacttacagctaggttgtattgttttgccgaagagtgataatgttaaagaaatgcaggaaaacttgaacatcgattttgaaatcagtgctgatgatatggctgatttggtcaagttaaaagaaaatacgcagaccatggctgtttaataggagcatcgcataagcggtgctttctttgttttaagggaaaaggtaatggaagaaattaagctaatcgcgatagatattgatggaaccttagttaattctaagaaggagattacaccagcagttaaaaaagcaattttgactgctcaaaaacaaggcaagcaaatcgtaatttgcacaggtcggcctttgtcaggtactcaacgttatttagatgaattagggcttaatggccaagaaaatcagtatgtagttagttttaatggtgcagttgtagaatcaaccgcggggcaggttattttcaaacaggggctaaaatatgaagattatgtagatttagagacaattgcgcgaaagctaaacttacattttcatagcgtatcgttagatcgaatttatacagctagccgtgatttgggacattatacaatttataattcacgggtcgtaaaattagaagtctcatatcgtacacaagaagaaatgaagcagataccaatcatcaaatgtatgtatgttgatgatccagactatttagatgataaaatagaatctcctttatttgaaatgatgaaagatcgagttgtattttcaaagactgagcctttttattatgaagcaaccgctgccggtgtcgataaggggactggcctgaaaagactatgtgactacttaaaaatagatcgaagtaatgtgatggccctaggcgatcaagcaaacgacatgccgatgttaacttatgctggattaggtatcgcaatgggaaatgctgttgaatatacaaagcaacatgctgacgaagttacggctgattgtgaccacgacggtgttgcagttgcaatcaataaaatattaaagtagatgttttctctttcaaatagtggtatttttactttaagatgaaaattgaatagaggtctaaaaataatgaataaagcaaaagttttagttttaggtggcttaagagatgaggccttaactgatttaaaaaatatttgtcaagttgatatcggtccagtaggacatcgaccagaagatgatcgtgagtgggtgcttgatcatattgcagaatatgatggtgtgatcgtagcaaagatggcttttgatcgagaaatgattgatgctgcgaaaaatttaaaaataatttcaacttatggcgttggctttgatcacgttgatgttgaatacgctaaagaaaaaggaatagttgtttcaaattgccctaagagtgtgttgcgtccaacggcggaacttgcctggacaatgattatggcatcagctcgtagattgcattattatgacgatgctttgcgtgaaggcgtctttttaaatgccgatgagtacgacaaccaagggtactccattgaaggaaagaccttaggaattgtaggtatgggtcgaattggtcaacaagttgctaggttcgctaaagcatttggtatgacaattatttatcataatcgtcatcaagtagatgatcaaattgcagcagaattagatgctaaatatgttgacttagatactttggcaaaagaagctgattttgtgagtttacatactcctgctacagctgaaacatatcatctggttaattcagactttttaaagaaaatgaaagacacagcgtttttaattaatgttgctcgtggatcgttgattgacggggatgcattaattgctgcgttaaagaatggttcaattgcaggcgccgccttagatgttttcgaaaacgaaccgcatccaagacctgaattggttgaaatggataatgtgatcatgacgcctcacgttggttcagctactcacattgctagatttaatttgtctaaagaagctgcgaataatgttttgtctttctttaaagatggtcaggcaattaatcaaattaactagttcaaacagagctaaaaaagacgattcatgcgaatcgtctttttctttacataatttttactgatgttaatcatgatcaagctgactatggtggtagccataaataaagtaaattacagcaccgatgattaaccaaatagctgccattaagtaaacttctgaacttaaatggcaaatcataaagatacaaattaaaccagaaatgattggcaaatatgggtatccgggaactttaaagccatcgttaacaatatctgttctttttcttaattttagaattccaaaggaaacaagagtaaaggcaaaaagtgtaccaaagttgaccaaattggctagttgatcaacggagaagaatgctgcacctgctgcaataataatagtgacagcgactaaggcattttgaggagagttatgttttttatctaatttactgaatgcactaggcaatagcccatcacgtgccatagcatagattaagcgagagcttgaatagatcattgtcagcatcatggtagccattcctagcatagcaccaaatgataataactctgctacccagttttgatgaacatattgcaatgcaaaagcaacgggattagatacgtttagcttggtataattaaccatacccgttaaaacgattgaaacgccaaaataaagtacagctgcaatagctaaagtgccaataattcctaggggcatatttttcttaggatttttaacctcggcggctgatgatgaaacaacatcaaagccaagaaaggcaaagaagactgtggttgctcctttgatgactcctgaaaaatgatatggcaagaacggatgatagttgttaggtttaatgaactgtaagcctacaaaaataaaaattaaaataatggcgattttaataaaaacagctacgacattaattttaattgagttcttcatccctcgtgacaacaggatactgataagtaaaatgattaaaacagaaaccaagtcaaaataaacgccattgttaagattcataggaccagaaatagcgtgtggaatttttagaccaaatggtgcaatgaaagaactgaagtatgatgaccaacctgctgccacagtggctacagatagcatgtattccaaaatcagtgcccaaccgataatccagcctgtaaattcgccataaacgatattcccatatgaataggcagaaccagctactgggatcgctgaagcaaattctgcataacacattccagctaaagcacaaacaattgctgcaacaacaaaggataaactaacgccaggtccagttaatgtggctgcaacagttccgggtaagatgaaaataccggtcccgatgacagctcctacgccaagagacattaaatcaacggcgttcattgttttggagaacttaatgtctttaccgagatagttctcaacattttgtttcctaaaaatattaaatttcattcgcaaacttcccttattatagattagattaattttacatgatatttttaatttttaaaagaagaaaacgctctatattttttatagagcgtttgaattaatcagctttaattttttgcttataccatttacaggaaaaatatattaaagcaattagaataagtcctccaataattaatgagtattcttcaaaaattaacacaatttgttcccaattttcacccatataggaaccaagaccaactagaatagcattccagagtaagctgcctaagctagtgtaaataaggaaattaggtaatttaactttggctattccagctggaattgaaattaagctacgaactacagggatgcagcgaccatagaagattgcaccggtaccgtatttatcaaaccatctgatagccttttgtacatcaccctttttaaagccaagtagtttgaataacttatgatcgaacaacttttctaatcgatctggattaagtaaagtgccaatccaatataaaactagtgcaccaactaccgcgccgattgttgaagcaataattacaccgaagacattcatttgagaatgatgggttgcaaagccagcgaacgatagaattacttcggatggaatagggggaaagatgttttcgattgcaattagcaaactgatggctaggtagccaaattggttaattaagtcaaaaactagattagtcatcaaaagttctcctcaaattttatttcttttaatatatcaacttttgtaccgaatagctatttctataagcaaagttaagatcttcttaaacagtctgtgttaaactattaaatgcaaattttttcagtgagatgagataatggcaacacaattaattgagaataaactaaaacttttaccagaaaaacccggctgttatttgatgaaagatattaacggtacggttatatatgttggtaaatctaaaaatttaaaaaatcgggttcgctcatattttaagagtaaacaggttggacgtcgtgctgaattagttcgtgaaattcgagattatgacatcattactgtatcaactgataaggaagcttttttacttgaaattacattaataaaaaagtatcaaccttattataatgttcaattaaagcagggtacgggatatccttacatagaaatcacgcgtgaacatgatccgcaaactcggttaactagtatcgttcataaggatggtggctactattttggtccctatcctaatgtatatgctgcccaggccactttgaagtttattcaaaaagtttttccactaaggcgctgtcatggttatcaaggcagaccttgtctttactatcatatggggcagtgcttaggtgcatgctttaaaaaagtgccacaaaaagaatacgaagagcaaattaaaaagatcaagagctttttgaatggagatattgctagtgttaagcagagtttgaccgaaaaaatggctcaagcagctagcaatcttgaatttgaacgagcagccgaaattcgcgaccaattgaaatatattgaagaaacggttgaaaaacaaaaaattatttccaatgataatacgcagcgtgatatttttaattattacgttgacaagtcttggatttctgttcaaatcttctttttacggcaagcaaagttattgcgtagagaaaccagaatgtttcctttgacagatgccacagatccagaagatgctttcacttcctttattgtgcaattttatgggcaaagaaatagggttttgcccaaagaaattctgattcctgaaggatttgataatgctactttagctgaggttttgaaggtacctgttagaacaccgcaacgagggcagaaaaagtcattgctagacatggcgaaggataatgctaagttaaagctagatgataagtttagattattagaactaggtaatcgaaaaactaaaggcgctcaaaaagaaatttttgatgctttaggcttaccatatggacactttattgaaagttttgatcactcccatattcaaggtgctgacccagtctctgctttagtcgtttttaaagatggtgaacccgaaaaaacagcttatcgtaaatataagctaaaaggtgaggttgaacatcaaaatggtggcgacgaagtacgcaacacgagggaagttgtccgccgaagatatggtagactgttgcgcgagcataaaagaatgcctgatttgattttgatggatggtggtcaaattcaggtcgatgcttgtttagatgttttacgaaatgaattaaatttgaatatcccagttgcggggatggttaaagatgataagcacagaacaaaccatttattatttggcgatcccatcaacggtattcctttgaaactgattccccttaatcccaaatcagagggcttttatttaatgacgcgcgttcaagacgaagtgcaccgctttgcgattacttttcatagaagacgccatgctaaaaatgctttgtccagtcgtttagattcgattaagggaattggtcctaaaagtcgtaacaaattattgcgcgaatttggttcattgaagaaaattaaagaagcttcaattgatgacttgcgtagagcaggattaacgcttactcaagcacaaacggtaaaattaacattgtaatccgagaaaacgcgatatcatgcgtatttctgtggtatagtattaaaagctagattaagacggaaggaagagatatacatgcctacatttgttgatcaaactaaaatcgaagtacaagccggaaaaggcggcgatggcatggtggctttccgccatgaaaaatacgtccctaatggcggtccagccggtggtgatggtggccgtggcggcagtattatttttgttgctgacagcggcttaagaactttgatggattttcgctatcggcgtaagtttaaggcggatagtggtgaaaatggtcgtattaaatcacaatatggccgtgcagctaaggatctttatttaaaagttccagttggtactactgtatatgattatgacactaatgaattgattggtgatttaactgaaaagggccaagaactagtcgttgctaaaggtggtcgcggcggtcgcggtaatatccattttgcaactagtgttaatactgcaccagaaattgctgaaaatggtgaaccaggtgaagatcgcgttttgcgcttagaattaaaattattggctgatgtcggcttagttggttttccgtcagttggtaaatcaacactgttatcagtaacaactaaggccaagcccaaaattgctgcttatcaattcacgactttaactcctaatttgggaatggttatcttgccagatggtcgtgacttttcaatggcggatttgccaggattaattgaaggagctagtcaaggcgtaggcttgggaattcaatttttacgtcacgttgaaagaaccaaagtaattctacatctagtttcaatggatcctaataatggtcgtgaggcaattgatgattaccataccattaaaaaagaactcaaaaattacgaaacagatttatcaaagaagcgagaattgattgtagcttcacaaatggatattcctggtgctgaggaaaaactagctgagtttaaaaaagcattaaaagcagaaggaaataatgaacctatttatgagatctcaagtgtaactcataaaggcgtagataagttgatgtcagatactgccaacttagtaactgaagttgaacaagaacaggctgaagaacaacctaagctagcacaaaagattaaagaatataagtatcaggcaccacaaaagaatgaatttacagttgagcaagttggcgaacatgaatttatcgttaagggtgaacaattagaaagattagttcaaatgaccaacttggatcaccaagacggtattatgcgtttagcaagaaagcttaagcgtttaggtgttgatgacgcactacgtgaaaaaggagctgttaatggtgatgatgtggctattggcaagtttgtctttgaattcgtacaataagagtagagatagggtatgaaaaaaaataggtttattacggggtattctggccttagagccttagcagttatcggagtaattctttatcatttggatcctaattcctttatgggaggatatctgggagtgccgatttttttcgtgctctcaggatatttggtgacagatcatatgtttaattcatatgataaaacaggatcatataataatcgtcatttttatttgagtcgaataaaaaagttatatccacaattaattactgttttatggttaagtgcagcctatatctttatctttcaacgaaatttactggctaaattaaatcaggttgtacttgcaaatctattaaatgtatttaatttttggcaaattcataatggtcaaagctattttgagcgttttgcagctaatgaatcaccatttactaatttatggacgatgtcaattgaaggccaattttatattgtttggccaattgtcatttatttactagttaaattggttaaaaagaaaaaaaatattttctggattttagttggtctatcagctgtttctgcattagaaatggcaatcctatactttttaaaggctgatattaatcgaatttattatggaactgatactcgtttcttttctttaggattaggagcagcattagcagttgtttggccgatagagagtttaaatcagcaagttgaacgaaaagtaggctggatactggacttggtgggccttgcttcatttgctttaatgttagcaatgtttttctctaagtggatgaatccacaacaagcctttacttactctggcgggatgttgttatttactttagatgtatgtattttagtagcggtaattgctcatcctggtagtcattggaatcaaatcctaactaataggttatttgattggattggatcgcgaagttatggcatctatctgtatcaatttccagtaatgatcttttttgaagataaggtaaatattggtgataatccaatgctgtatcaccttattgaagtgattttaattttagtgattacagaaattacttatcgtttgattgaaagaccaatgggtaggattacctgggataaaacgaagcaatattttgctcgaatttttaattttgaaacaaaagattactttaagaaaggtcaagcagccttagcagctttgattttaatcttaggatcagcagctattgctatttcaccaggagtaaaagcagaagactttaataaaagccaattagcacagcgaattaatcagaattctaaaaaacaaaaaacggataatgctaaattaattgaaaagttaaaaaaagaaaaaaagaaaaaagaaaaaaaatctaaaattattcgtgaagctgagcttcaaactaaaaagcatcctattaacaaatcctttgttaaatatggtatttcccagttagatttgcaatttgctcaacatgttcaagtaactgcgattggcgactcggtaatggccggttcgagcaacgatttaaaacgattaatgcctaaagcgttaattgatgctgctgtttcaagacaattgaatgttgcttttggcttattagatagttatcaaagtcaaggagttttagcagataatatcttaatagggttaggaactaatggacctttctcaatggaagatcttgatcgaataatgcatcaggctggacctaagagaaaagttttctggattaatgttcacgttccaactagagattggcaaaattcagtgaataatttgctaaatcaaggtgcaaaacggtatcataatcttataataattgattggtattcatactcgaagaatcatcctgactggttctacggtgatcatactcaccctaatttaaagggctcaaaatactatagtgcattagttaccaaaacaattgttaagcattcaaaattttagattagaataggattttcatggaattacaatttttaggtactggtgctgggcaaccttcaaagcaacgcaatgtttctagtgttgcacttaagttgctggatgaattgaatgaaatctggctttttgacgtaggtgaagcaactcagcatcaaattttaagaacaaatattaaattacgaaaagttaccaaaatttttatatcacataatcacggtgatcacatttttgggttaccagggttattgtcaactcgttcttttcaaggtgatgttggtcctattactatttatggtcccagtggtattgaagaatttgttagaacagctcttaaggtatctcggactaaaatttcatattctataaggtttgttgaattagctaaatcagggttaatctgtgaggataagggctttcgagtgtatacggagcaactagaccaccggatacctagttttggttttagagtagtggaggcttcacatccaggcgaattattaattgacaagttagcacagtataatgttcctaatgggccacttttggggaaattaaaaaatggcgaaaaagtaactttagctgatggtactgttttggatggtaaaaatttcttaggacctactaaaccgggaagaattgtgacggtcatctatgacacacgttccacgccaagtattgctcgtttggctaaagatgcagatgttttagtccatgaatcaacttttgcaggggatgaacaaaaattggcgcatgattattatcattctacttcggttgaagcagccaaaattgctcggaaagataatgttaaattattatgtctaaatcatatttctgctcgttatatgggtgctaaagggaaaaaactcgaaaaacaggctaaaaaagtattttctaatacagtattagttaatgattttgatcagattaatattccaatgaaaggctcagaaaaatgaaagactcattaagaaataaagttgttgtaattacaggtgcttcaagtgggattggacgttccattgcccttgaaagtgctggtcgtggtgctactgtaattttaattgctagaagaaaggaccaattagatgaaattgcagcagaagctaaagaactatccggtgctgaagcatatgtttttccaacagatatgggtaagccggaagaaattgaacaaacctttaatgcaattactaaacaagtaaaacacattgactttttagttaattgtgctggttttggtaaattcgaagaatttatggaccaaaaaatgcaagacgttaccaatatgttccaagttaatgttttaggtttgatgtactttactcgtttagtaggtagggtcatgatggaacaaaagactggtcaaattattaattttggctcaattgctggcaaggtaccaactaccaagtcagccgcttacagttcatctaaggctgccgtaattcaattttcaaatgtcttacggctagaattaaagccatttggtgtcaaggtaatgactgtaaacccaggaccagtttatactaatttccttaatgtagcagataagactggaaattatgtcaaaaatgttcaagaatttatgttggatccagatgatgttgcttggcaagtagttcacttctttggcagtgataaacgtgaattaaatttaccacttagtttagctgtagcggctaaattgtataatctatttccatcgattggtgataagatttccttaaagtttgcttctagaaagtaaaaaaagatggaaaaacaaagaaatttaattattggatcagttgtggctttaattgcagtaatttttgttgttttaaatacatcacctgtcgcaattaattttggcttttttaaggtgaggttaccactaattgttgtgttagtggtaatggtgattatcgggatgattattgcttggttctttggacgagatactaaggaaaaaacggatcacaaggtcactttcttcaataaaaaagagaagaaaatagaataaatcttgatttattagcaattgaatagtatgattgaactacgtgagtgattcggggttatatgaccctgaagcttaagactacaataaaggagatcaaattaaatggcagttcctgcaagacatacttctaaacaaaagaaacgttcacgtcgtggtcacattaagttgagtgttccagcaatgcactatgatgcaactactggtgaataccgcttaagccaccgtgtttcaccaaagggttattacaagggtcgtcaagttgtaaataacaacgacaacagcaataactagttaaaggacacctttgatatggtgtctttttttatgcctagaaaaaggaaaaagaaataatgaagttagtatttttacattctagtgatacacatggatttttattgccaactgattaccaaaataaaaccgactatcatgctccttttagtttgagtagagttagctcagttattaaatctgaaaagaaaaagtatggtgataacaatgttgtagttaccgatgcaggtgattgtttgcaaggctcaccacttgcttcctatgctcattcaactggcgattatagtgatttacgtatttttacgcaagcttataatgcagtggggtatgatgctcgctgtttaggtaaccatgattttaactttggattagattatttaagctactatgttgataacaatgaggcaccaatcattaatgataatgtactggatgcagaaacagaagttccattttttggtagagaatacactattatcaagagaaatggcttaaagattggtttattggggattacaacgcaatatatcccacattgggaacctaaagaaaatgtaaaaggcttaaagtttgcctctgcttacgaaaaaattaagcattatgccaaaatattacgccctcaggttgatattttagctgtgatgtatcatggtggctttgaaagtgatcctgaaactggtaaggcgactgaacctaatcgtggtgaaaatgaaggttatcagattttaaccaaaattccagaagttgatgtcctattgacaggtcaccagcatcggcgcttaaatttggttacacgcgatactgctattgttcaaccaggttatcgcggtgaagctgtagctgaagtggttcttgatattgatgatgatactaagaaaatcaaatcaatgtccactaagttgattgacactaaagattatgatcctgatcctgtaattgttgatattgtatctgacttggataaaagaacacaaaaatggctagatcaaccaattgcacatttagataaacctgctcgaattgaaaatgcaatgaaaggcagaatagaaggcgcgccatttattaatttaatccagcaaatgcaattatggtttactaaagctgatgtttcggcaactgcagtgatgagtgagactgctaagggatttgataagaccattactatgagagatgttttgttaaattatccgtatgctaatcagttgtgtcgtgtgaagctgactggtaaagaattacgtcatattattgagcactctgctggctttttgaagaaagatgaagcaggaaacattggctttattgatcgatggattaagcctaagccaatgttgtatcattttgacgtcttttatccagtcgaatatgaagcggatttatccagaccagtaggtgaacggctgactaaactaactttgcacggtaagccaatcaaagatgatcagatttatcatttagcagttaacaactatcgtgctatgggtgggggattttatcctgaatatagtatggacaaaattgaaaccactttggataaggactatgtacaaatgtttagtgaatatttgactcatggaccagtcgaagtagatacaaaaaagaattataagttttactaaaccaaacgaaaaagacgtgagaataaaaacatctcacgtcttttttgaatagattgaataattattttaacttactgtatttactattatctttgtgtgaacgagcagtaatagtcgcaataattgctgagaaaagaataccaaaaatgatcccaacgattacacaatttcttaaatctgtgccgttgaatgaagcacttcgggttaaaggaccagcaataaagcctacaactaacatgtagattacgctccatacagttgtgatgatataacgacccataatgattccttctttcgtgtaagattttatcaaaaatgaagcgcaaattcaaacctgattggttcaatttggtatacttaatttaatgtttgtaatgacgaaaggtggttaatttatgcaagtagcagcacttcaaaacataagctcctttacgcttttaagtagtccaaccaaggtaagtgatttgataaaagacgctaaagagaagggctatcctgtggttggtttagccgacgtgaacgtgacttatggtttggtcaatttttatgagttggctaaaaaggcgggaattaaaccacttcttgggatgcaactgcgtttaaatggtttggttgatagcacccaaaaatatgatttgctagtttttgccaaaacaaataagggctatcataatttattgcgactttctagcgcggtaaatttgttaacggaaaatgggcaaaacgataaggtcttaacgctgaatgaattaaccaaatatttagatgatttgttgattatcgtaccagctaatctaaaaagtgaattaatggcgctgcatgatacaaatcaggcattaggcagtgattatgttcgccaactaaagaagttaacgtttgatctttatttgggtgtatatgcttcaaaagcaagtatagattacattgattatgtccgtggattagctaagcaatttgaattatctttagttgcagtggaagatagtcaatatttacggccacgtgagcaatttttacaaaaaactttgcgtgcgattgctaagggagataaattgcaagatatattgccactagctaagcaagctggttcgcattatttagattctgcacaaaatgttttagaacgctatcatcaatatgacttggatgatgcaattaataatacttggaaaattgctcagaaatgtaatgctgaagtgatctttcaaaaaccggtcttacctaaatatcatcaagataagtttccgacttcagaagaatatttgcgttatttggctcaaactggtttacaagcgcgctttggtcaaaaaagtattccagccgagtatcagaaaagattaaattatgaattacgagtcatcaatcagatggggttcgatgattattttttgattgtatgggatgtaattaactattgtcaccgagtaaaaattactactggtccaggacgtggttcagcttgtggttcactggtttcatactctttgcgtatcactgaagttgatcccatccaatataatttactgtttgagcgttttttaaatccggctcgtcatgagatgcctgatattgatctggacattcctgatattcaacggaatacagtaattaagtatatgtatcaaaagtatggcatggatcatgctgctcaaattttgacttttggtacaatggctgctaaacaagtattaagagacgttggccgggtttttggcttaacaggaccagaaatcactaagtggactcacgcaatcccgtactctaaagataaaatgggattaaaaaaagcatatcaagagtctagagaactaagattattggttgatgcaacgcctgagaataaattgttatttaagactgctttaggacttgagggattgccaaggcattattctattcatgcggctggattggtgattagtgatgattcgattgctggcatttcgggattgcaggctggtcctttcggcattcctgtaactcagcaaaccaaaaaatatgttgaatcattaggtttgctaaagatcgactttttgggattgcgcaatttgacagttttaggcaatattttagctttagtgcggcagcaaggtgtaaagctagatcctaatacaattccgttaaatgatcccaaaacaatggaactgtttcaacaaggtaaaacagatgcagtcttccaatttgaatctggtgggattcgtggtgttttgcgtaaattgcatcccgacaattttgaggacctagtagcggtgaacgctttataccgtccaggtccaatgcaaaatattgacgcatttgttgcaagaaaaaatggtacggctactgtgcattatcctgatcccagtttaaagcaaattttacaatcaacttatggaattttggtttatcaggaacaagtcatgcaaacagctcaaatcctggcaggattttcattgggtgaagccgatattttacgacgtgcgatgtctaaaaagaatcagaatgtcattgagcaagaacgtggaaaatttattgctggtacggtcaaaaaaggtcatcctaaagaagtaggtgagcgagtttatcattatatagagcaatttgctaactatggttttaaccgttcacacgcggtggcatataccaagattgccttttggctagcttatttgaaggttcattatcctgctgcattttacacagcgatgctcaattcatcaacgtctgctaaagtgcaaagctattcgatgcaagctcaggaagctggagttcgtattttgccgcctgatatcaatcacagccaattagactatactttacaagatggcaagattttagttggtttaaaagcaattaaaggattacgtcttgattttgctaaggaaatagctgccaatactaaaccgtataagtcttttaataattttttgcgtagaatcgatgctaagttcttacaagtagacgcaattgaagcattgattatggctggagcatttgactcaatcgaagataatcgcaatgagttattgcttaactgcaaagatgtaattgctaatgtgcaattaacgggacaaaatatgtctttatctgagattctgggggatgcaccacttaagcctgctgagccaccgactgctgcccaaaaagcagaaatggaagagaaagctttaggctttactacaacaactactcctctaatagctgtacaaaaatatgcacaaaaatttaacgctagaccattgaatcaatttcagttaaatgatagtggtattagcgtgggtaaattaatgaagttaaagcaaattaggaccaaaaatggaaaaacaatggcttttgctagttttgctgatacatctagcgaacaagaaattattatttttccaccggcttatgaaaaatttggctctattttaaaagaaggagatatttatttactaggagtcaaggttcaaggtgatcgatttgaccaaaataaaaaacagtatttcttaaccaatttgcgaaaagttaattttaaagaataaagttcaaattacaaagctatctttgacgatggatgtaagtgctaacaaacttaaatacggaaagaaagcataaattagcccaatttttgtgagcttttttgcctaaaaaatgttaatatttatgtgatgtgagaaattacacaaaataatcatgatgaggtgaattcatgaaacggattggtattttaactagtggcggagacgcccctggtatgaatgcagcaattagagctgtgacgaagactgctatccatcatgggcttgaagtctttggaattcgttatggtttcgctggtttggttgcaggtgactttgttccgcttaccacggaaaatgttgaccacaagattagtgaaggcggtactttcttgtacagtgctcgtttccctgaatttgcacaagaagaagtgcaacaaaagggtgttgagcaattaaagaaacacggtattgatgcggttatcgtaattggcggtgacggttcataccatggtgctttagccttgactcgccacggcgtaaactcagttggtttaccaggaactatcgataatgatattccttatactgactacacgatcggctttgattctgcttgtcgtactgctatggatgctatcgataaaattcgtgatactgcaagcagtcaccaccgcgtattcgttgttaatgtaatgggtcgtgaatgtggtgatatcgctatgcgtgtcggtgtagcaagtggagcagacgcaattgtaattcctgaacgttcatacgatgttaaggaaattgcagaaactcttactcgtggttttgcagatggcaaagatcatggtatcattgttttagcagaaggcgttatggctgctgataagtttaaggacgaactccttaaatatggtgactttgatgctcgtgctaatgtccttgcgcatatgcaacgtggtggctcacctactgttacagatagagttaatgctactaagatgggtaattatgctgttaagttacttctcgatgggaagggcggtttagctgtcggcatggagaatggtgaacttaatacccacgacattcttgatttgtttgacggtaaacaccaaggtgattatgcgttattggatgtaaatgaagaaatgactaaatattaatttagttgatttttggagaggatttttttaataatgaagaaaactaagattgttagtactttagggccagcttcaaacgatattgaaactattactgctttagctaaggctggtgcaaacgtattccgtttcaacttctcacacggtgaccacccagaacaccttgctcgtatgaagatggttcgtcaagtggaaaaggatactggtttacttcttggtatcgaccttgacactaagggtgctgaaatcagaaccactgaacaagaaggtggcaagttcactattaatactggtgacatgatccgtgtatcaatggatgccactaagaagggtaacaaggacatgatccacgttacctacgacggtttatacgatgatacccacgttggtggtcacgtattaatcgatgatggtttggttgaccttttgatcaaggaaaaggacgactcaaagagagaacttgtttgtgaagctcaaaacactggtgtaatcggttcaaagaagggtgttaacgctcctggtgttgaaattcgccttccaggtattactgaaaaggatactgatgacattaagtttggtttgaactatggtattaacttcattactgcttcatttgcacgtaaggctcaagatatcttagacatccgtaagctttgtgaagaagcaggtgcagactacgttaagatcttcccaaagattgaatctcaagaaggtatcgacaacgcagacgaaattttgcaagtttcagatggtttaatggttgctcgtggtgacatgggtgttgaaattccatttatggaagttccatttgtacaaaagagcctaatccgcaaggctaacgcacttggtaagccagttattactgctactcaaatgcttgactcaatgcaagaaaacccacgtccaactcgtgccgaagtttcagacgttgctaacgctgttcttgatggtactgacgcaactatgctttcaggtgaatcagcaaatggtctttacccagttaaggctgttaaggctatggctgaaattgacgaacgtactgaaaagcaaatgcttaagcgtaatactttagctcttcaaagattcgaagcttacaagggttcaaacgtaactgaagctatcggtgaatcagttgtacgtactgctcaagaattaggtgttaagactatcattactgcaactaactcaggttacactgcacgtatgatttctaagtaccgtcccaatgctgacattattgctatgacctttgacgaaaaggttcaacactcattgggtatcgtttggggtgtacaaccagtattgactgaaaagcctaagtcaactgatgacatgtttgaaatggctgctaaggtagctaaggaaaagggttacgtaaaggatggcgaccttgtaattatcgttgcaggtactccacttggtgactcaggtacaactaacttaatgaagttacaaatcatcggtaacaagttagttcaaggcttaggtgttggtaacggttcagttatcggcaaggctgttgtagctaactcagctgaagaagcaaatagcaaggttaaggaaggcgacatcttagttgctaagactactgacccagactacaacccagctatcaagaaggcttcaggcttagttgttgaagcttcaggtttaacttcacatgccgcagttatcggtttatcattaggtatcccagttgttgttggtgctactgacgctactgacaagatttctgatggttcaactattactgttgacgctcgtcgtggtgctatctaccaaggcaaaatttcaaacctttaattttaagaatataatttagatagattagctaatcaaaaaatagccagcttaagtgctggctattttattttgcataaaaatctcttatacttatatgtaagaatatgtaaagtaggagatttttaaatgcttggaacagttcgtaaaggaaaaattactgacgaaaacgataaagcttattatgttcaaattgatggactgacttatgaattgaagaagatcgagattacgcaagatgatattcctaaaattggagatgaagtcgaaggttttatttatgataataaaagtcatgatcgagaaatgacacaatttttgccattcgcgcaacccgatcaatatggttggggaaaagtaaccgaggtacgtccaggcttaggcgtctttgttgatgtaggtctacctgataaagacgttgttttatcaatggatgatcttcctagagaaaaagaaagatggcctcgacgtgatgatcgacttttagtaagattagaaactgacgaaaaagatcgtatttgggctaagctagcagatgaaaatatttttgaccaattagctgctaactttccacgtggaatgaataatgaaaatgtctttgcaacggtttatgttacacgagagataggagcatttgttttaactagtgattattatcttggctttgtacatgaatcgcagatgccacgtcctatgagactaggtgagcaattcaagggtagagtagtcggtgtcagtcaatatggacgtttgaatttgagtgctttgcctcgtgcttttgaagaaattgatgatgatgcgcaaatgattttgatgagtttgcggagaagagaaaccaagactctacctttctatgacaaatcaagtgcacaagaaattaaatcatactttggtatttcaaaatcagcttttaaacgtgcggtcggtcatttgctcaaggctggattaattgaagaagataaaacagcaggtacgattactttaattaaggatccagaagagaacgataatggagaagattaatttaaaagatcaaattgatgattatttacgctatagtcaagttgaacgaggattaagtgataatacaattaatgcttatcgtcaagatttagaagaatttcaaacttttgtagaaaatgaaggtatggcttcatggccaactgaagcaagcgatgtggatgcgtttttagctcggcagcgtgatttgaacaaagcaaccagctcaattagtcgacttatttctagcatgcgtaaattttatcaatggttagctcggcaaaatattcaaaagttaaatccaatgttggaaatcgatttgcctaaaaaagaacgtcgtttgccgacagctctctctcaagctgaaatgaataggctacttgagcagccaaatactaaacgaaagttaggtatacgtgatcgtgctatcttagagacattatatgccacgggaatgagagtaagcgaattaattaatttggagttgcaggatttacatgacgatttaggcttagttcgggttcttggtaaaggcgaaaaagaacgattgattccaattagtcctgttgctcttgattggataaaaaaatatgaaaatgaagttcgtgatccgctaattttacaagtagggaaaagcgatgaacatatttttttaaataatcgaggaaaaaagattacacgacaggctatttggcagatgatcaaaaagtattgtcaaatggcggcaattactaaagatgtcacgccacacactttacgtcatacgtttgcaacacatttgctagaaaacggcgcagatttgcgagtagtgcaagaaatattaggacattctgatattagcacgacacagatctataccaatttatcacaaaagcaaattttaaatgtttatcagaagacacatcctcgtctttaggtgattaaatgctaatacaatataaaaaagattatgagaagatagcaatgggattactatcctatttacctgattttaaaaatatcgaaaacttaaaagaagaaatcacgcttaatcaggatgaaaatgactttattttgtatctttatcgtaatagtcaaaataatatggtgggcgtaataggaacccaagtatctaatcagtttgtaattattagatatttgtctttagctcctggttttcgtgagattagttatgaacggaaaattgttgatgaactaaagcacgaatatccagataaacgaataactgctgtaccagaatatacaaatttatacgcgtggtgctagttaaatctttctagacaataagccaaattataagctaaaattgcaatttccaaccggctttgaaagcctatcagactacgtgctcgattgttctcggcattgtaataggtcagaagcgaaaagtcgctttcaattgttctgcgaatagccatcaattgatgatcattgtgctttttagctcctgtcatatttttacgatatggtgtccaaagttcataacccatttgttttagctgttgatgcagttctttgcctaaatagccttcgtcgccaagaagatagtaattagatggatgggcattttccagcagttcaactgtctccttggcatcatgaactgatgcttttgttacgacataatcaagaatgtaaccgtcatcgctaacaatggcatgaactttgaaaccatagaagtaaattttcttggtggccttataaccaatgttggcataaccgcgaaaaattttagcacgatagttgcgaattggttggcaaacaggtaccggaaagctgtcaatgatcaagaaatgtccattcaggtcaacctttttattcatttcttgccgtatctgataaatcaattgcaatagctgacgtgaacgtcgattaaaacgtgagtgtgataaacaattgaaacattcacagaatcttctttgtgattcaattcctgtcttagcttgccagataagtaaagccaaaatcagactgtccgtagttttaatttgatcaatatttcgccgatgagtaaactcagccggtgcatacaaacgataccagtgccgacaaattatcactaaatctttaaaactaacttgtaaatggtggctaaaacgcttaagcttaaggcagttcaatcagatcaggctcttttctattattatacaagttgagtctaacaagattggacttttttattaactaaaacgatttaactagcaccacgcgtaaatttattaaaaacgatagaagaagataatggacaaaagtaacttaactttagaattaccgaattttgaaggaccacttgatttattactgcatttgatccaatcgcaaaaaattgatatttatgatatcccaattgcccaaataactagtcaatatttagaatacttgcgccaaatgcaaagcttaaatttacaaattgcaggcgagtattttgtcatgtcatcaactttattgcgaattaaatcacagtatttgttgcctcaaaacgattttgtagatgatattcaacctgatgaagatccaagagacgaattagtgcaacaattggtacaatattctgtgtttaagaaaatatctgcttattttaaagaacgtaatgaagaagtaccgattacagttgctaaagaagctagtgtatcaaccactgctaaagttcaaccgctgcctaagggtcagataactgcacaagaattagcgacgacttttacgatggtcttacatcgtttgaagttgcagcaaccagataccgcttcaattagagtagcagaaacgccgatcaatgagatgatggattttttgcatggacaattgaaacgaaaaaggcaagttagtttctttgcttgcgcggacaaaatgcagaatatctcagatgttattggcttatttttagcgacactagaattgtgtaaaaaacaattaattcagattacacaagcacgtgaattcggtgatttaaatttagaaagaattgatacgaatggcaagtaaactagcaaatttagaagctcttttgtatgtcgcaggtgacaatgggcttgaggagcaaaatctaattgaactacttgaagttgatggtgaagagctaggtcagttagtcactcgtttgcagcaaaaaatgaaggctgatccagactcgggaatgcaaataattcatattgcaaatacttataagatgacaactagtcaacagacagctaagataattgaaaagtattttcaaaaagatttaactaagaatttgagtcaatcagcacttgaaattctctcaattattgcttatcgacaaccaattactagaatagaaattgatgatattcgtggagtaaattcatcaggagctttacagacattgatttggcgaggattaattaaacaagacggcaaaaaagatgctccaggtcatcctaagttgtatgttacaactgattattttttacaatattttaattatcaaagtttggctgatttaccgttaatcgaagactttgaggatacaactgatggtgaggagattgacttattcgattcaaaaggtagcgcagacaaacatttagaaaaagagggatagaaaatggcagaacgattacaaaaagtaattgcggaagcaggaatcgcttcaagaagaaaagctgaaaaaatgattgtagccggtcgagttaaagtagatgggcatgttgttactaagctaggtactaaagtcgatacttttagtaatattacagtcgatgatgagccaattgagcgggaaagcctacacacgtatttattttataagcctcgtggcgttgtttcgactgcagaagacgatcgtggtagaaaaactgtagttgattatttcgaagatttaccatatcgtttgtatccagtaggaagattagattatgatacgtcaggtttattgctaatgactaacgatggcaaattagcaaatttattgatgcaccctaaaaatgaagtggctaaggtctatgtagccaagattaaagggattttaactcctgatgaaattaaaaccttgactcaaggagtaaagttggatcattttaaggctgcgcctgccaaggtcaaagtattgaaaactgatcataagaaagacacacaaattgtccaaattacaattcatgagggacattatcatcaagttaagcgaatgtttaaagcagtaggtcacttagttgataagcttgctcgtgaaaaatatgcctttttaactctggattcgcttacatcagggcaatatcgggaattatcgaagcatgaagttgacaaattaatgcaattgaactaaattataactgtaattaaatattcaaggttattgtcttcagggcagggtgaaagtcccgaccggcggtgaaagtccgcgacccacgtcagtggttgaatcgttagataccgatagttaaagtctagatggaagaagacaggctaaaaaaacttactacactttttaaggtctgttgctgaagcaatagaccttttgttttggaaaaggaaagtaagttatggatcaagctaaatccaagaatagtagtttaactaatgtgattgcatatgctttaattggctgtattgcttttgtagttatgaaatttgaatttccaatcatgcctggagttgccttcttaaagtttgatttttcagatgtcattattacaattggaatgtttatttttggcattgtaccgggagttattattgctttaattcgaatgttgcttagtttaatttttagtggttttgcattaccaagccttgttggaaatctagcagcattcttagcttcaatgtcatttgcagttccattttatttattaagtaaaaatgtgagtgcggataaccgcaagacaatgatgggcagagttaaaccaatttgtggtttggtaattgggattatcgcaatggcagcagtgatgtcattggctaatgcctccgttttgactcctatttacgcagtaacagcggtaccaaacttgcctactattaatagctatagtgccttgttaagctttactgagaaagtttacttgggtcagttattgcatttaccatcaatgtcaacctacatttttagtattatcatgccctttaacttgttaaaaggattaattaacgctgtggctgtttacttattgtttgaagctaccttgaaaacaattaagccattcgttcgtaagagatttaatttgaattaagttatcatcccatcaattttttaagttgatgggatttttcatattcaaagcatcctaaaatatgctaaaattaatccgttaagtgaatggaggaatttttgatggataaaaagtcaaccgggccatatcagcactatgaacgacctactgaaaagcgaagctcacaagatagtcagcctagtggatcagcacgttggatagcagttattataattttagcggttattttaattgcacttatcccagttgttcatcgtttggcttcaagccattcagaaaaagctgaagaagttcaaacagttaagaaggtttcttctaaatcatccaagtctgttaagactaagaaaacctcatcatcttcttttagcaagaaaaagtctgaaaaggctagttcaagctcatctagtagttctgctactcctaagacttatttagtccaaagtggagatactttaaatgaaattgcagaaaagaatggcttgactgttgatgaattagccagattaaataatcttaaagactcttcaaatattgaagcaggtcagacacttaagttgaaataatctttcagaaaggataaaaggggtcgatgataagatctcttttttattagaatgcaagtagcagtagatggtcctgcatcagcaggtaaaagtacagttgctaaaatcattgcaagtaaattatcctttgtctatatagacacaggggcaatgtatcgtgcatgtacagtgattgctcgtaatcataacttagattatggtgatgaagcgggtatcttgaatgccattgatgaagatggaattgaattgaaatctgaaaatggtgagcaaaaagtatatgtagctggaaaggacgtttctaaagaaattagaacgcctgaaatttcagctaatgtttcggaagtatccgctttgccgaaagtacgagaaaaaatggtaagtctgcaacgtgaaatggcaggcaagacaaatgtcattatggatggtcgcgatattggtacgactgttttacctaacgctgaagttaagatctttttagttgcttcagcaagatcacgtgctgaacgtcgtttattagattttaaagagcgtggtattaaatctgaccaaacagttgatgaaattgaaaaagatattgcagcaagagattataaagattctcaccgcaaaatttcaccgctaaaaaaggcagatgatgcaattgaaattgacaccacaaacatgtcgattgacgaagttgtagaggcaattttagctcaaatcgaaaaaaaacaaaaaaattagaaaaaatagcacaaaatagtagaaaaatatctcggtttcctataaaatgggacatgatattgggaggtacatatgtcagaaaacagtaatcaatttttagacgcattaaagcaaatgcaaggagttgaggtcggagatattgtcgatgtcgaagtattagacattgaagacggccaaatcgatgttggtgttgaaaacgctggtgttgaaggtgtcattactcgtcgtgaatacacttcagaccgtaacgcagacttacgtgatttagttaagcctggtgacaagtttaaggccttagtattaagaagagccggtggcgacaaggaaaatggtgaattcttcttctcagttacccgcttaaaggaaagagaagcctacgacaagttacaaaaagacttcgaagacggaaatgctgtcgaaggtactgtaacttcatcagttcgtggtggtttaattgttgatgttggtacacgtggtttcttaccagcctcattaatttcaaaccgttacgtttcagatcttaagccttatattggtaagactatgaaacttaagattaccgaaattgatcctaacaagaaccgcttaatcctttcacacaaggatttagttgaagaagaacgtgaagaagcatttgacaaggttgcatcacaattagttgttggtgacgttgttgaaggtaaggtttcacgtttgactaacttcggtgcattcatcgatgttggtggtgttgacggtttagttcatatttcagaaatttcttacaagcatgttgacaagccaagcgatgttttaaaggttggtcaagatgttaaggttaaggtcattggtatcgacaatgacagacatcgtatttccctgtctattaagcaaactgaaccttctccatttgaacaagctacagctgacttaaacgaaggcgatatttttgaaggcgaagtaaagtcattaactaactttggtgctttcgttgaagtcgctgatggtattcaaggtttggtacacgtttcagaaatctcaaacaagcatgttgacaagccaagcgatgttttaaaggttggtcaaagtgttaaggttaaggttttgaacattgacccaagtgatagaagaatctcactttcaatcaaggctgctgactcaaatgcttcttcagaaaatcataattctcgtccacgtcgttcacgtaacgaaaattcagtaaacaagaagtacatgagtgataacgacaacggctttgcattaggtgacatcattggtgaccaattaaaggaccgtaagtagtcattttataaaaaagccgacttgagtcggcttttttatttatgtttagattagtaaaggagggcgagaaatggttttaccagttgttgcaattgttggtcaacccaatgttggtaaatcaacacttttcaatagaataattaatcaacgtttagctattgttgaggacaaacctggtgttacccgagatcgtaattatgctcaagccgaatggatggggcataagtttgatttgatcgatactggtggtattacctgggaaggtggcaagatcgaggaagaaatcagagctcaagcagaaattgcaattgaagaagcagatgttatcgtgatgttaaccaatgtggtaaatcacgtgacagatttagacgaaagaatagctcatcttctttaccgtactaaaaagccagttattttagctgtaaataaagctgataatcctgaacagcgaagcgatatttatgatttctatagtttaggattgggggatccgattcctgtttcaagtagtcatggtactggtattggtgatttgcttgatcagattgttaatgattttcctgacgataaagatactgaagctgatgatgttatttcttttagcgttattggtcgaccaaatgtaggtaagtcttcaattgttaacaaattacttggtgaagatcgggtaattgttgctaatgaagaaggaacaactcgtgatgctgtcgatacgccgtttacccatgatggtgtaaaatttaaggtcgttgatactgccggaatcagaagacgaggcaaagtgtatgagaagacagaaaagtactctgtaatgcgcgctatgagtgctattgagcgctcagacgtggttttccttgtcctcgatgcaagtacaggcattagagaacaagacaagcatgtggctggatatgctcacgaggcgggtcgtggaatcatcattgtcgttaacaaatgggatttgccaaaaaagaatagtacaagcgctaaagaatttgaacgtgaaattagagatgaatttcaatatttggactatgctcctattctttttgtttctgccaagacaggtcaaagattagatcaaattcctaatatggttaaagaagtctatgataatcaaaatcaaagaattcaatctagtgtcttaaatgacttgttgcttgaagcaagtaagttagttccaactccaatggtgaagggtaagagattgcgtgtttattacatgacccaagtaagtacgaatccaccgacttttgttgtatttgtgaatgacccagaactgatgcacttctcatatgaacgatttttgattaatcaattacgacaaaactttgattttactggtacaccaatcaagattttaccacgtaaacgtaaataaaagataagcaaaatatcacaaagaccttgttgttataaggcttttgtgatatttttgtttttaggaaacatgattagttgtgatcatttttccttgtttagcttaaacaaagaaaaattttttgaacattaggttcaaattcaggaggtgaattattcatggcaaataaggctgaattagtttcagaagttgcttcaaaaactaagttaactaagaagcaagttgcaaatactgttgatgctatccttgattcaattcaagaaaaccttgctaagggtgaaaaggtacaattaatcggttttggtacttttgaagtacgtcaccgtgctgctcgtaagggccgtaacccacaaactggtgatgaaatcgaaatcccagctagtgaagtacctgcatttaagccaggtaaagctcttaaggatgccgttaagtaatagcttaactaatgtgataggacgttggactttgttccggcgtctttttttagtacaatggtaacttgattggaggtattatgagttattctgaacaattactagatgcaattcaaaatcatgatttttcacaaaacaaacaccttttaaaagaagctttagataatgatgatcccgaggtcttgtcatctttagcagaaaacctaactggcttaggttttacagatttagcaaaagaaatatatcgagctttaatagctaaatttcctaaagaagatttatttaaagtttacttggcagagattatgttaaatgatggcgatgatgacgatggtctgtcgcttttatataatgtccctgagagctcttcagcttatttagatagtctattagtacaagctgattattaccaaactaacggcttaatagaaacagctaaggacaaattaatacgagcactacaattagctccagaagaagatgctattaaatttggtttagcagagattgaatatttaagtggtaattatgaacaagcacttgagttatatcaagatttaatcaaacgtcaaagtacttttagtgaagtaaatctgtaccaaagattatttgcgacttttgccaaattaggtaattatgaagaagctgccaaagttattcgtaaacatgcaaatagtattttagatattgattctaagtatgaagcaggattagttctcttatctgtaggtgatgataagcaggcaattaagttcttagatgaagtgattgagcaaagtcctgactatgtaaatgcgtatccattattagcacaagcttatgatcatcagcatgacaatgaacaagtattgaggactgctcaagcaggattagcgtacaatgaactggatgaaacactttattcaatgggagcacgtgcagcagctaatttgaatgaattggatacagctcgtgacttacttgaaaaggggttaaaagtagcgccagacaatagtgatttacgtatgcagctatctaacctatatgttcatgaacaccaggctaaggagaatattgccttatttagtaacttagatgaggaaagcgtggagccacaggcacattggaatatggcattatcatatgaggatttggatgatattcagaaagcacagagcgaatttttactagcttatccggatttcaaggataatccagactttttgcgccaaatgataatcttttttaatgtacaaaataatgatgaaataacaaaacaactgctagaaagatatcttaagttagctccagaagatgatgaaatgcaggatctttataataatctgtaaaaaaataccacgaagtttttgcttcgtggttttattatttctaaaaaataggtgccaacagacgtgaaaagtattgtttaaacttaagccatttagattgctgattaaagtattcattagttagaagactgcaactagctaggtccttttcaaaaatttgtttaagttcttgagttaattgaatattgtaattaaaagcgttaacctcgaagtttaaggtataacttctgaagtcttgattggctgaaccaacagatgagatattggagccagaaaccattgttttggcatggatgaagccatcattatatttgtaaattttaacgccatgagcaactaaatattttgcataatattcggtagctcggtaaacaaagggatgatctggcatgcaagggatcatgatgcgtacatcaacaccgctattagcagcaataattaatgcttctaaaatggattcttcaggaattaaatagggtgtttgaatatagatatagtttttagccccagcaatgatgccctcatatcctcggcgaatgccataatgttggttatcgggacctgaagaaacgatttgcattgctacgttatcatcgttgtcaagatctttacgttcgacagtaaaagcatgtaattcgcttagatcaaatttaggtaatgcagttcgtctgatagaagtattccaatccatggcaaagcgtgtctccattaggataggtgattgacccacaacacgtaaatgtgtatcgcgccaatgaccaaattttttagattgattaacgtactgatcaccgatgttaaagccaccaatatagccaatatgatggtcgattacgattaatttgcggtgtaaatgataatttagtcgtggtgtagtaaaccaatgctttttagaagtagaaatgaaaggctgtgcttcgccaccaagctctcttaaatgattaaaaaaagcaggtttagtaccacgtgagccagagacatcataaataactctgacttttactcctttagcagaagcctcttctaaggcccgtaagacacgctttcctagattatcattataaaaagtgtagaactctaaactaatcgatgttttagcttgcttaagatcagcaattatttggtcaaacaactcgggtccactggtgaaaaccttaactttattggcaaaagttaaaatagcatcatcgttgtttaaattcagctctgataacatgcgggcacgtggtttgcgctttttttcgggtaaaagatcatgttctgccaacatagctttttgtttttttagataacgattacgcgtctctttttgagcactttgaatagcaaaaatttcgtcactaagtgtataattttttacggtaagttgaataaataattaaaaaagcccaagtcctttgaatttggacttgagctcaaacaaaaagaccagtagtctgatgttaagaacaaaaaacacattagaagctggtcttttatgaattcaattgtaactgaaatcgcaaatattataaagtctgaagataattatattaagcgtgaaagaaaaataatctgtttcttcttaaacctgattaaggaaatcatggccttggctttagctaaagttgatgatgaaatgattaccaaggttaaagcacagggctatcagattgataagaagaatgagcgctcaatcaatatggcttttggcgaagttaggtatgtcagaagaagatatgtctgcccaggcaaacaagcaaggtatcccttggatgaattaatgggctttgacaaatacaagcgctacagtattttagcagtcaaaaacatcttagaagtaagcagcgttgccacttatcgcaatactgctctagcagtcaattgcctgtctggctttaatattagccatatgcaggtgggcaatttggtaaaaatggccgggaaaaatattaaagcgggccaagaagcagattcaagatatgatgccgcaggcgagactgtaaaatagtttgtgtaaggatgaatgattccttaaatttatttctttaaacattagaaaaaggggttcctttctcgtatgattggtttgaacaaaaaaacacatacagaaagaagaactccttcatgaatgattttaccaaagattttgctcaagctctattcaatccagacaaaataaatgatttattgcgcaaagagctacaacaggctgttaataacttgttagaagctgaattgactgcctttctgggctatgatccctatgccagaaatggctggaatactggcaactctagaaatggtgcttatttccgcaaagttgatacgcaatttggcccaattgaagtgcaagtgcctcgggatcgcaacggtcagtttcatcagcacacgctgcctggctacaagcagcactcggatatcttggaaagcatgattatcaagctttactccaatggcgtgaccaccagggaaatagccgatctaattgaaaagatgtatggcagccattacagtccagctcaggtatcaaatatttccaagcagatgattccaaaggttgaggcttaccacaaacgcaagctaagcgacaagtttttctgcgtctatttggatgcgacataccttcctttgcgccgagaaacgtttgagcgtgaagcagtctatattgccattggcattaaacctaatggacataaggaagtcattgactactgcattgctcctagtgagaacattgaagtctggacagagatgcttcaaaacatgaagtccagaggcttgaagcaagttgaactctttctttctgatggtgttgttggcatgaaaacagccttggccaggacttatcctaaagctcattttcaacgctgtttggttcatgtcatgcgcaatatctgcgctaaagtacgcgtcgacgatcgtgaaaagatcatgaacgaattcaaacaggtgcatcaacagacaaacaaaaaagaagctgcagctgtcttgcacaaattctatgccaaatggaataaagcttatagccatgtcatcaaaggtttgaaggaaattgagcccgatctgctagtcttctacaattatcccaaacaaatcagagcttcaatttattcaaccaatatgattgaatcctttaacaacgtcatcaagcgtaaagctaagcctaaggcagaatttccaactgaacagtcgcttgatgcatttattggcatccaggcaatgagctacaatgaccgttatttcaatcgaattcataaaggctttggtcaggttcaggacaccttagaatcctactttgattaaataaataattaaaaaatcaatttacgagaaagaactatttacacaaaagatttgacagtttctagtcatcgtccttataacttgaaaattatttattacgcatttttgacaaatacttttgatgcttttcttcatctttttcaatgaagaagtaagctactgcggctaatacccctacgactattccgaccaaaatagttttccaagtgaaattggttaccatgtagcatgaaataattaatgccaaagctggaataacatagccgaatgggagcttaaaaccgttatttggaaattcattagtatgcttgaatttgattactgctaagatagatggtacatattgaataaatgaagccaatacaatgcaagataccaagaagaggtatgattgtgtgattaaaatcatagtgatgattgcactgagtaaaatagctacccaagcagcatcatgcttgttcttttttccaatccatttaggtaacattgcgtgctcattagcaagagaagcaatcaacgatggagtcaagagaagcaatcaacgatggagtattgaaagatcctgcaaaagcaacgccgataacactaatcagcatccctgcaatcactagaacgtagccccaatcaccaacggccttttgaaaggctacagcaataggcgtactgtaattaaccatcttggatcctaaaatcccgatagctactaacatcattaatgcatataaaatagtcacagtgatcatcactgagatcaatactttgggaatatttttctctggattattcatctgttttggggcaatcggaataaaggagaatccagtaaacatgtaaaatactacactaaatgcagcaccaaaatgtttgaagtaaggaccaacacctagggttgctgctttaggaatcacaggtgtaaagttcattttatgaataaaaaaggcaccaatgatgataaaaatcagaatagtaatcattttggcagcagaggataagttatcgactaattttacaattgtccgaccaaataagttaataatcgtaaacagcacaattagcacaattattccaatagctatcccgtagtgaacagcgtgattactaaaaacaggggacaaagtctttaaaatagttaacaaagctactatttctgccgcatatgtacagcatcctaaaaaccaagtatatattccaagttcgtagccagtaaatcgcccaaaggcgtgatatgaataaagccaagctgcgcctgatccagtaaaacgacttgacaagtcagcataacaaagagtaaccatacttactgtaagagcagcacaaattgttatgaaaacactcatcaagttcatatctttatagattgtttgaggtattaaaaaggcaccggacccaattaccccattaattcccaagaagtaaatagacatgaacgaaagcttcttgggagtaactgttttttggcattgttttcatcctcttgattgcttgatattgacaaacgcttacaagctaagattagttcttgccatgaaagattgcaaagaataagtgttatccatcccataaataaaaatagagaaaagtgtataacctctgcattttttgttaaaatataggtaagaagattaagtaatgattaggggatgagatcatgatgaacaaaaaaattatgtatatggcaggagtagtcttagcctccttaagtttaggtgcgatgactgctcagacagttaacgcagctacaactaatccaattcgtcagggtaaaaagttaaacttgactagaaaagcaacgatttttaaccgtaaaggagaaaaagttggacatttaaaaaagggccgtgtttacaagatcctaggcattaaatcaattaatggcaataattttgtgaagattggtaagaataaattcgttaaggaaggggcatttttaccatacattaaggacacagccgagacaattaaccgcattaagcatccatcatatgtttatgataaaaatggtcagccaattccaggtaagtttgttaaacaaggctctaaagttaaaaatcttggccataaagaaattgatgaacggccattcattcaaattggagaaaacgaatacgttaaagctaataacgtattgactgtaattattaattattagtaaaagaaaagctatatcatgaaatgcatcatggtatagctttttacttgtggatgaaaaagcgatgtggttttttataagtaaatccttctcccattgcctcatttacctcaattattgaaacaaaagcatgtggatcttcttgcttgattaaagctttgattgatggaatttcccgcggtgcgactacaacataaattacacgtttttcattttgttgatagccacctaaagcttttagatatgtgaaaccacgatttagttttaaatcaatcatcttgccaatttgttcatatttgtcagagataattaataaaccacgggctgtgtatgcaccttgctgaacggtatccattactcgggataagacaaaagaagctaataatgtgtatagcatatgcttgatgtctaggtaagatagggatgcgaagagtactattgcatcacaagctaaaagcattttgccagacgaaataccaaattttatctgacagattcgggcaataatatcagttccaccggaagtaccattatatctaaatactaaccctaatccgattccagacaataacccagcagaaattgctgaaaggaagaggtcgtgttctaaatctaattgttttataataggtactgaatgccaaaaccataagaaaaaggaaagactgagcgttccccagattgtataggctaaaagacgtttgcccataaagcgatagcctaacaaaattagtggaatattcaatacaagggtcgatagtcccatgttgatgccccaaaaatgccgcagaagaagtgaaataccacttagtccgccgtcggctagtttattggggacagaaatcatgtctagacttaaagcggaaatagcacagcctagcgcgatcatgaggatatcaattaagatacttttgtcaatcttacgcataatgattacctcctttatgtctttcctcaattttaacaaagtgtatagcaaaagtaataataaagacaataagaattgagattttaatatgataaagatagataatttaccagaaatttttaccaaggcaatgcccgtgttacagatattagaaaatgcaggctttgaagcgtactttgtgggtggttctgtccgcgatgttttgttacatcgtcatgttcatgatgtagacattactactagtgcttatccagaagaggtaaaagagttatttgataagtcaattgatacaggaattaaacatggaacggtgactgtcctttatggtggtgaaagttatgagattaccacttttagaacagaatcgggttatcaagattttcgtcgtccagatcatgtaacatttgttcaaaacttagatgaagatttaaagcgtagagactttacgattaacgctctggcaatggatacacgagggcaaattgttgacttatttaacggactagatgatctcaaaaaccatgtcattcgtgctgtaggtgatccagaaaaaagatttcacgaggatgctttgcgaatgatgcgggccgtacgttttatgagtcaacttgaatttaagttagaaagcaagacccaacaggcaattaaggataatcataaattacttaaaaaaatttcagttgaacgaattcgagaagaatttgtaaaattagatttaggaccacatgctcggcaagcttttcaggtttttcttgatacaaatttgagtgaagatgtacctgattttggcggaaaaaaagatcaactagctattttcccacagttaaaattcagtccaacgatggaaaatagtttgtggtcactgataattttgctattgaaattaccgaatgaacaaattcatcgttttatgcgtgactggaaaaactctaatgctatgactgagcaagtcgaaagaattattaatctatttgatttactttctagtcatgctcctagtgattatgaattattcttagcaggggaagagacattaattaatacgattgacgttgctcatattgttggtcaaccaatttcttcagaagctttagttgatcgttatatggctttacctattaaaaaagcgtcggaactagccgttgatgggagatttttaatagatcgcgggatgcgaccaggtgcaaaattggggcagactttgaataaaattcgagagttagttgtttcaggtgaagttgagaataatcaagaagcgattgaaagctatttgactacaattgaatagaaagaaaaatgtagcagaattcaactgctacattttttaaacataaagtaaaacggaaaagtacattaagattgaaccgagcataacaaataaatgccagatagtatggataaagggaacattgcgcatactgaacagaatcgcgccgattgtgtaagcaatgccaccactaactaatagccagaatccagttggacttaagcgaacatataaataagatcctgacaagataactaaccatcccattgcaacatagaggattgtatcaagtatgacgtgtttaccacgattgaagatgtagtaaatgatgccaaagatggttaggccccagatcaagccaaataaagtccaaccccaggctccaccaattgcaacaagtgaatatggagtataagatcctgcaatcaaaagaaagattgaggaatggtcaaaaatttgaaaaatatttttggcccgtgtaaaaactaaactgtgatatagtgtggaaaataaataaagcagtaccaggcaagagccataaattgtgaaagtaacaactcgcatcgggctgcctgtatgagctgcctttacaattaaaattactaagccggtaactgctagtccgaaaccaatcccatgagttatggcactaaaaatattatctagaaggtagtacctttctgatcgttgttctggttgctgccaaagtttgctaattttcatgaagtgtaatcaatccttttttcttctaatagttttttgatacaatacagtatatatgttgcttacattttatcataaatcgggtaaacaaattagaattgaaggcgaatacgttgtcgaagataaaagttatgacggactcttccgtccaattaacaccagaagaagttgaaaaatatgacattacagtagtcccattgacgattaccatcgacggtaagtcatatgtggatgggattgatatcactagaagtgattttgtcaagaagatgaatgaagcggagagcttacctaagactagtcagccaccaattggccgttttgttgatgtgattaaaaaattaaccgcagatggcagtcaagtgattggtattttcttagctaaatcattaagtggtacgatagatgccgctcgtcaagctgcagaaattgcaggtcaaagcgataatgttacaattattgactctgaactaaccgacagggcagaaggcttccaagttttggctgctgctaaggatgctcaggctggtaaaagcatggctgagattattgatcatgttaaaaagattcgtagtactcaaaaactggaaatgatggtagttaatttacaaaacttaatcaagggtggccgtttaggtgcactttctggtcgaattgctactatgcttaatattagaatcgctcttcagatgccacaaggtaagttaatcgtagccaaaaaaggacgaggtaagaaatttacacgtgcttttgatgaacgagtgttaaaagaaatcgcagataataaagagcatattaaagaagtaggcatttcgtacgttgatacacctgaattaatggaagaattagctgaaaaaattcgtgcaatcaatcctgcgattaatgttttagtggcagagacaagtccaattatcgcaacacatgctggcaatggtgcttatgcgatcttatattatgtggagtaattatggcttaccgagaaagtttttatcgatatttaatgacgcaaagggatgcagattcagctgatgacgtagctcaatttgcgaataatgcacagcatgacctgacttttcctaagcaagaacaagattatgagaaattgtcagattatttggaattgaatgctagttatttaccaagtatgtcaatttttgatcgtgcttatcgaatgtatgaagacaaaatgatgtattaagcccaagcctgatagatgcctgggcttttttattaagtgggtagaaaaatgcaggtagtaatttttattggttttattgtctttgcggtagcatttgcgacgattattcaacaacgctttttgaagagaatatcagttaattacattgcaatggcgattggagcggctattgcactagtaccacaaactaattcattaattgaggactttagctcggaattatttatgggcttgattgtagcgccattactattttttgagggacaacgtactaggttgtataatgttttacgttcgtggggcgcaatagttgggttaacggttattatgattatcttggcaactataactgcgggattcgggatctattttagtatgggtctctctaccactggcttttattctggctgcaatttcaacgccaacagatgctacagcaacagaatctgtaacacatggattgaagctgcctaagaagattgctttttacctaaaagatgagtctttgtttaatgacgcttcaggtatcattttgcttaatatggcagttgattggtacttgcatcaagaattacggattggacaagcaataggtaattttttatattctgcaggtggaggttttttctaggagctttggtggctactttattagttttcttgcgtcaggaaagttttcgctccaaatatcatttatctgctggtgttgcaatgccggttgatgtcatattctttttgacaccgttaataatatattttttagcagaagaaattcacgtttctggaattattgcagtcgttgcagccggattgattcataacgttgaatctgagcgaagcaggcttactaatgcctttattttttataacagtaatcaattatcgcaacttctgattgatattttaaatgggattgtctttttgcttttgggaatcatcattgttcggtcaatgagggaagacattttaatcaacaaacaattgatgcgattttgatcggaataattttatacctagctaatttgcttattagatacttttattatcgatttagcccttctattaaaggaaaaacgagtaataaagaagcattgatttttagtctgggtggcattcatggagcagttacttttgctttagcatatacgttatatgatttacgtattaatgtagcagatttccatttaattttggtgagtgaaattacgcttattttactaagtatgattgttccaacaattgtttttcacatgatcttggacaaagatatacctgattttgatcaaagaaaggaagttgatcgagttcgtgtggcaatgattgagtatgctatggatcaaatgaaaaagatctatttacctaaaaagattcgaaaacaattaaaattcgatttaagggcacaaatgaatcaaacttctatggttgattttgctagggaaataaagtatacaattaaacaaaaagaattacccgatgatcagaaagaatttagagctgaggtatatagatatgcttttagacaagaacgtgactatttaggtaaaattgcacaacaagagagaaaatatcgtcgaggctttctggctttatatagacagattttgatgtcagaagtggtgttcttagatgatgaaaatgattaattttagaaagaagagataatatggcaacaattcaatggtatccggggcatatgaacaaggctcgtaatcaactggaagataagttaggactgattgatgttttggtggaagtacttgatgcccgaattccgcaagcttcaagaaatccaatgattgaaggactagttggtaataaaccacatattattatcttaaataaggctgatttagctgatccagttttaacaaaggcatgggcagcagaattagctggagataataagtatgttttggcacttgactccttgcacaatactaatatgcagaagttggtttccttagtaaaaaaggcggcagctgccaaaacagagaagctagaagcacgaggggcctcaaatcctactattagaattgctttggcaggtattcctaactgtggcaagtcaacggtgattaatcgtttagttggtcggaacgtggctgaagtcggtaacaaaccaggtgtaactaagggacaaagatggctgaaaacaaatgctaatattcaagtgctcgatacaccagggattttatggcctaaattttctgatcaggaagttggttataaattagctgctttcggtgcaattaaggatagtgtttttcatgcagatgatgtagcattatttgttttgaaaaatttacgtgaattttatgctaaggatttgcttaaattttctaaattacctgaacagcaaattgctgatatggctgatccagatttgcttttgtcaatgactgaaaaatatggcatgcgtgatgattatgatcgtttttcattatttatgttacaaaaattgcgtaagggtgcaatcggaaggattacgttagatagaccatgacaattaaagaaataaaagagctgttgaaatctgaggtctctgaagcccaaattaacgaacttgaggcagatccgcgggccggcgtacaaaaattgttagttagttatcgtaagcgtcaagcaaaattactagcaaaaaaagaagagtttttgcgtcgcttttcttatgaaaaaaagttctgggaaaagggacaattagtagcgggtgttgatgaggtaggacgtggccctttagctggaccggtagtaactgctgctgtgataattgatcaagattttgatttattagatgtaaacgactcgaagaaattgagcccagagaaacgattgaagttatatcctaaaattttagcggaagcagttagtgttggtattggagtaaaaagtgcagaggtaatcgatcaaattaatatttatgaagctgaccgtcaagcgatggctcaagcagtacgagcacttgatgttaagccgaatgcacttttggtagatgcaatgaatgtgccagtaaatctaccccaagttaaattgattaagggagatgctaagtcgaattcaattgcggcagcttcaattgtggccaaggtctttcgagatcaattgatggatgattatgatagaatataccctcaatattgctttcatcataatgcaggatacggcaccaaggagcacattgaagccttgaaaaagtatggccctacgccaattcaccgcaaaacatttgctccagtcagtgatttttttgaataaatttcaatttataaaaaaataatggtctctttttgcgtaataaatagtggagggctttttttatgaaaaaaacagaatttctactaaaattaaaattgcaaaaagggattggttatgttaaattgctgacaattgctaatcaggtaactgatgaaacagaaattgaatttgaagaattagaacaaattgaattaactgaggaactaatggatgcatgctatcgcgcttttcaggatgatcagttggatcgaatggtacaacaaattgaacagcagtgtgacgtaatcagttttttcgatgaagcatatccagaaaaactacgtcaaatttatcgaccacctatggtattgtttacccgaggagatatttctttactgcaaaaagaaatcattacaattgttggctcacgctatccgactaagtatagtcaagatgttattaatcgcttggtacctaatattgtgcaatctggtcaggttgtagcaagtggcttagcaaaaggcgttgatgccttagctcataaggctgcacttttcaaccaaggaaaaacaattgcggttattggcaatggtttaaatttttcatatccaatgcaaaattttgctttacaagaagagattgtgcaaaagggactattgattagtgaatatttgcctgatacaccaccgcgtccgtatcgttttcctgaacgcaaccgtatcttggccggcttaagtcaaagtataatcgttactgaggctaaagaaaagtcgggttcactgattactgctaatttagcgttacaagaaaatcgcgatatttatgcagtacctggaccaattactaatgcattgtctgcaggtcccaatcaattaattgaagcaggagctacgccaattgttgattttaaatttaacaagataaagatttgacaattcagaaagtattagttatttttggactgtacccataaaataaaataagaattaaggaggcagttaatgcctactaaagcgaaaagtaaaacaacaaaaaaacgtaaaaagaccttagtcattgtggaatcacctgcaaaagctaagactattgaaaaatatttaggaagaaactatcacgttattgcttccaaggggcatattcgtgatttgcctaagtcacaaatgggaatcgactttgaagacgactataagcctaagtatatttccattcgtggtaaaggcgataccattaaagaattaaaaagcgaagccaagaaggctaaggatgtttatttagcatccgaccccgatcgtgaaggcgaagcaattgcttggcacgtagcgcacgcattgaatcttgacgaaaaagccaagaatagagtaacttttaacgaagttaccaaggatgcagttaaagaaagcttcaagcatccccggacaattgatatggatacggttgatgcccaacaggcaagacgtgtacttgatcgaattgtagggtattcactttcaccaattctttgggccaaagttaaaaaaggtttatctgcaggacgtgtacaatcagttgccttaaaattagtgattgatcgtgaaaaggagatcaagaactttaagccaaaagaatattggtcaattgatgcggaatttgctaagggtaaagaaacttttaaatctgccttttatggtgttgatggcaaaaagaaagaattgcctaatatcgattctgttaaggatgttttggctaaaatcgataagaaaaaggactttgtagtagataaagttgttgctcggcaacgtcggcgtcagccagcagccccatttacaacttctacaatgcagcaagaagccaataagcgtttaggttatcgtactcgtagaactatgagtattgctcagcaattatatgaagggatttctttaggtaagcaaggaacagttggtttgattacttatatgagaactgactctaagagaacatcaccagttgcccaacaagaggcttctaagtttttgcatgaaaattatggtgcagaatttgcagctaagagtcaacgccattttaagaatcaagaagacgcacaagatgctcacgaggccattcgcccaacatctgtatatcgcacaccggagtcattaaagagtgtcctaactacggaacaatatcgtttatacaaattgatttggtcacgttttttggccagtgaaatgaccccagctgtttatgatactgttcgtgcagatattgttcaaaatggtgtgatttttagaactactggttctaaattgaaatttgctggtttcaccaaggtttatgataatcaacaagaaaagaatgttgacttacctgatcttgaagagggtgacaaggtcaagatgactaagtccgataacaaacagcactttacgttaccaccagcacgctatactgaagcatcattagttcacgcattggaagaaaatggcgtgggccgtccttcaacttatgcacctacaatagatacaattcaacgccgctattatgttaaacttgatggtcgttcaattgtaccaactgaattaggtgaaattgttgatggcttaattgaaagcttcttcccagatattactgatgttgattacaccgcccgacttgaaaatgaattggatgaagtcgaagatggtaaaaaggattgggttcatgttgttgacgaatactatcaaccgtttaagaaagaattaaataaggctgatagtgaaatcgaaaaggtacaaatcaaggatgaaccagctggctttaattgtgatatttgtggtgcaccaatggtgattaagatgggacgctatggcaagttctatgcttgttctcgtttcccagattgtcgtaatactaagccaatcattaaagaaatcggtgtagtttgtccaaaatgtggcaaaggtcaggttgtcgaaaagaaatcacgtagaaatcgtaaattctacggctgttctcgttatccagaatgcgactttgtctcatgggacaagccaattggcagaaattgtccaaatgatggccactttttagtagaaaagcattctaaaaaaggtccagtgattctttgtcctaacggtgattatcgtgaagacagtgaaaacgaaaaaaacaattaacatagaaaatataggtgagtaaatgccaaaaaatgtaacagttattggtgcaggtcttgctggtagtgaagcaacttggcaattagctaagcgtggtattcatgttgacctttatgaaatgcgaccaaaaaaggagactccagctcatgaaactggtgaatttgcggaactggtttgtaccaattcaatgagatcaaatcaattatctaatgctgtaggtcttttaaaagaagaaatgcgtcatttagattcattgatcatgaaagctgccgacaaaactcaagtgcctgcaggtggagcattagccgttgatcgtgatagtttcagtaaatacgtaactgacactttgcgtgggttagagaatgtaactgttcacgaagaagaagttactgaaattccgaaagatgggattacaattattgcaactggtccgttaactagtgatgctttagctggacagattcaaaaattttctggaactgatagtttacatttctttgatgcagcagctccgattgtggccgctgactcgattgatatgaaaattgtttataaaaagtcgcgttatgatcgtggtgaagctgcatatttgaattgtcctatgactaaagagcaatatgaaaagtttagtcaggaattaattaacgctgaaactgcgcaattacatggttttgaaaatagcgatgtttttgaggggtgtatgccaattgaagtaatggcagcgcgtggggctaaaacaatgctttttggtccacttaaaccagtaggattagaagatccacatacaggcaaaactccttatgcagttgtacagttgcgccaagataatgctgcagcttcaatgtataatattgttggtttccaaactcatttgaaatttggtgaacaaaaacgagtattttcaatgatcccaggcttagaaaatgcacgtttcgttcgttatggtaaaatgcatcgtaatacttatatggcttcaccagaagttttgacagcttcttacgaggcaaaagagcagcctggattattttttgcaggccagatgacaggtgttgaaggctatgtagaaagtgcaggtagtggcttagtagcaggaattaatgcagcacgtgaagctatggggaaagatactgtggctttcccaaaagatactgcgttaggctcaatggctaactacataactactacgagtgctaaacatttccaaccaatgaatgctagttttgctttgctacctccactagagggtaagaagattcgcaagaagcgtgagcgccatgagaaggtcagtgaacgtggtcttgctagtttagatgaatttaagacggaagttttagattaatgaaccaaaggcaaagtgagttagatcaatttttatcatatttacaaaatgagcgtcattatagtgcgaaaaccgttttagcttatcaaacagatttgcatgaagcggaaaggttttggcatgaaaatggtggattcccaggttggactaaagtaagagaacgtgatatccaggtttatctacaacatttagcagaacgcaagttagcccgtagtagtcagttgcgcaagatgtccagcctgcattctttttaccactttttaacccgccgcaaactagtggcaatcgatccaactcagggtattactttacgccgtggtgagaaaaaattaccgcaatttttttaccagcctgaattaaagcaggtttttgattcattgaaaggaaataagcctttgacgatgagaaatttggcaatgtttgaactgttttatgcgacagggatgcgggtaagtgaggttagtaatcttactttgaatcaacttgatttagacttacagacaattttggttcacggtaaaggaaataaagaccgctatgttgcttttgatgataaaacaaaaaaatctttgattgcttatttagaaaatgcacgtccattattacttaaaaatgatgatgaacagcatgtatttttaaataatcaaggaactggcattactagccgcggaattgaaactgtaatgcaaaaaacttttaatcaggcaggaattagtggtaaagtacacccacatgagttgcgacatagctttgctaccgcgatgcttaataatggagcagatttgcgaagtgtccaagagttattaggacacagtagtctatcagcaacgcaaatctatactcatgtaacaatggctcatttaaaatcagattatcaaaaatattttcctcgtaataaagaaagttgaggtttaacatgacaacaatttgttcagtaagatttaatggaaaaacagcaattgccggtgatggacaagtaaccttaggcgaaaaagttattgccaaggcaacagcgcgtaagattcgtcgtatttaccatgatcgtgtagtaattggttttgccggtggtgtagctgatgcagtcagccttcaagatatgcttgagggcaagctcgaaagctactcaggcgatcttcgtcgtgctgccgtggaaatggctcaagcatggcgtaaggatccaactctacaaaaattaaatgcaatgttgattgcttttgatgacaaagacctacttttaatttcaggtaatggtgaagtacttgaacctgatgaaaacgtagttgcaattggttcaggtggtaattttgctcaagccgcagcgattgccatgactcgacacgcaaaagatatgaaggccgatgaaattgcacatgaagctgtaaagattgcttcaggaattgatgttttcactgatgataaaattgtcactgatgaaatttaggagtgaaggaaatggctattaagaccccaaaagaaatagttaaaattttaaacgaatatattattggccaagatgaagctaaaaaatcagttgcgatagctctttacaaccgttaccgtagaatgcagttatctaaagaaatgcaacgtgaagtaacgcctaagaatttattaatggctggtcctactggtgtaggtaaaactgaaattgctcgtcgtttagctgatattgtagaagctccctttgttaaagtagaggcaacgaagtttactgaagtaggttatgtaggacgtgacgttgaatcaatggtccgtgacttggtttccgaagccgtacgaatggaagaaaaggaccaatttgctcgtgtaaagactcaagcaactaaagaagcaaataaagaattagttcgtttgttagctccagcagagaaacatgaacgtcgtgaaaatcaaatgcagcaaatgcaagatatgatgtctatgttgatgggagaaaataatcgcgaagaagatcatgaagaggatgtttctgctgatgtaagaaacaaacgaatggatgtggctgaaaagctagctaaaggcttacttgaagatcacgaagttaccatagaggtagaacaagctcctaaggccaacccaatgagtgacatgatgggtcaaatggggatggatatgggctcaatgcttagtgatcttatgcctaagaaaaaggttaagcgtactttatcagtaaaagaagcacgtgaagttttgattcaagaagaatcacgtaagttagttgactatgacgctatctatcaacatgctattgaaagaagccagaataacggaattatctttattgatgaaattgataaaattattgctggtaataaacgtaattctggtgaagtttctcgtgaaggtgttcaaagagatattttaccaatcgttgaaggctcaactgtaaatacaaaatatggcccagtttcaactgatcatattttgtttattgctgcaggtgcctttgctgaaagtaagcctagtgatttgattccagaacttcaaggacgttttccaattcgggttgaacttaacgctttaaccaaggacgattttgtcaagatcttgaaggatccacaaaattcattgcttaagcaatacattgctttaatgaaggcagatggcattaagttagttttcacccaagaagccgttgataaaattgcggagattgcctttgatgttaaccaaggcactgataatattggtgctcgtcgactttcaactattcttgaaaagctcttagaagacgttctttacgaagggcctgatatggaaatgggtgaaatcacagttactgaagcctatgttgaagataagttaggcgatattattatgaataaagacttaactaaatttattctctaattgatcaaagaatcacgaatgaagtgtctgggaaaaaaatagcttccagatgaataaaaacgatcaagatttccttttttaagaatcttgatcgtttttttgttctctttaaaatttttaacaataaaaatcggcccttcagccaccttctttgacaatatttgttcaaattcatcatcataaaggcaattccgatatcggtttcgaccttctctttacctcgcaggtgcgttctgcgcatgccaaatacgttcttcaaatgtccgaaaactggctctacatcatattttctcatgccatagatgtgtctgccttcttcgctttggagaacttcttttgctttttcttttaaatattgccagttaggattatagcgaacttggcgctggcggccgctagctgttttagccaattgttccaattctggcgttagctggaactcgtctgcctcataaaccttaaaatcacggacctgaccagtagaacgatccttgcgctggctgtaatatttgaaattgaatctgacgccatgatgatcaatgtaataatcatctttttcattgtagtaccagttgattagcttagttggatcattcttatactttttggtctgttctttttcatacatagtgtagggaataaagtacttcttgtctggatatttttcctccagcatcgaataattgtattcactgccatagccagcatcggcgacgattttgtcaaacttgtccaacacggtcatttgatccaaaaccggctccaaagttttgaaatctgtcggattaggaaagatggcataatcaactacatattgatcggtcgtgactgcttgaatattgtagccaggctttaattgaccatttttcatgtggtcttccttcatatgcataaaggtggcgtcatgatctgttttggaataactgttgcgtccggcaaagatctcttcggcttcttcatatttttgcattcttggcacataatcttttcttagccggtgcagaatcttttttagtccacgtcgcttggcttttcgaggtgaaccgccaggaatggctttgttttcctgctcaatctctttagtcagcttgttaatttctgcttcagtttcttgagctaattcctttagcccctgactagtttgaactttttctttttccatttctttgactacttctttagtaatcaattcatcataaagttcaactgcctggcctttcagcttttcatgatacttttcaaccgctttgcgccagacaaatgtatagcggttagcatcagcttcaatcttagtaccatcgataaaagcagcaccttcattgattaagccttcatcttctaacaggttagtgaagtagataaagctctttttaatcagttcattggcatggctgcttgatctaaaattattgatagtatgatatgaaatcttttgctggtcagccaagatcatcattggcagattttcttccagcatcaactcaatctttctgccagaaaaaactcttctggagtaagcaaaaagcagtattttgagcatcatggctggatgataggctgggcggcccgttttagcagtcttgcctactaaaacatcttctggaattgaatctacaaaccagctgatgacattagccaaatgattggccggaatggcaaaatctagattaagtgttaaagcagtttgacctgtgatataattcttgtacatgttagtttccaccttttttattttgtgatgatttaataatatcaaggctggagctaaaagtatacaaaaagagcgttgaaacaaaaattcaacgttcttttttcatgatctgagacttagttttttcccagacacttttttcttttgtttttattctggcttattgacgcattaatgttaaaatataagtaattaagcgattacattatgatttttaactgtttgatatgtagagggaaatttagttatggattacacaatcaagaataatatgatcgaagtagtgatttcggatcacggagctgaagttcagagcgttaaaggagctcataccggtgaagaatatatgtggcaagctgatccagagatctggggcagacatgcacctgtactttttccaattgtagggcgacttaagaatgatgaatataagtatcaaggtaagacctatcatatgggtcagcatggttttgcccgtgattgtgattttgaagtggagaatcatacacaagaaagtatcacgttcttactgaaagataatgaaaaaacgcgtgaaatgtatccatttaaatttgaattcagagttaactataatttgatgaataatttattggaagaaaactttagcgtagttaataaatcagatgaaactatgatttttggtgtaggtggtcaccctggatttaacttaccagtaaataatggggaagagaaagaagattattatttcgatatgcatccatctattgctagggtaaaaatcccacttaaaggagcatatcttgactggaataatcgttctctagcttcgactgatagttttattggtttaagtgatgagctatttaaagatgatgccttgatttatgaattacatggtcatgacaataaagtatctttgagaactgataagagtaagttccacatcaatgtttggactagaaatgcaccatatgttggcatttggtcacaatatccaaataccgctaattatgtatgcattgagccatggtggggaattgcagatagagaagatgctgatggtgagctagagcacaaatatggtatgaatcatttggagccaggtaaggaatatcaagctggatttagtattacttatcactctgcatctgatcctgaataaaatattgaggaataaaaatgaaatatttaacttttaataacggtgtaaaaactccaatcttcggctttggaacatatagaattcagcctagaattactgaaggagcggttgtcgaggctttgaaggctggatatcggttaattgatactgctcaagcatacagtaatgaagcagaagtaggcaatgctattaacaaaagcggcattaaacgtgaagacatttttttgaccactaaagcgcaaacaagtggttatagagagacgaagaatgggattgatgaatcgttaattcacgcccagcaagactattttgatttaatgattattcactggcctatgtctgatagtttaggtacttaccaggcacttgaggaggcatatcaggcgggaaagctacgttcaattggactgagtaacttcaaccatgatcaagtaaatgaaattatgaataatttcgatactaagccagtagttgatcaaattgaaacgtctgtctttaagcaacaaaagaaaatgcataaatatttaattgaaaataatattgtacatgaatcttggtcaccactcggtgaaggaatgaaggctttatttaatgacccaaccttactttctttggctgagaagtataataagacagtgccacaaattgcgttacacttcttggtacaagaaaatatcatgattattcctggctcgacgaatccgttacacatgaaggataatttggatatttttgattttgaatttactgctgaagagatggagacattgcgtggccttgatcaaaaacgtggtattggtggctggcctgcaagtatggatcaagaattagattattaattaaataagcatccctaaaacgatcttttatggcgtagggatgcttattttgtcgtcaaattttgttcatatattgcatgatttttacaaatattgcagagaaatctagatttattaaaaatatttccaactgttacgaaaaaacatttttctttaatcattgtgtgatctgactgtgatggaactgcaactcgaagcaggtattatataaaatgtcaattgcaagagaataataaaacaaaaatgatgaatagtaattgacgttttaatttaaggagagatgttttttgaaaactaaatctattttaactaagactattgctgttgctgctttatcacttgcaggtattggtgcaatcaatcaactagataataatgaagcacaagctgccgttgtgcaaaatgatgcagcagtgtatacaactacacaagctactaccgtttacaataactatgaaaatccagttgcaactggtcaaactctagctgcaggtactaactggaagattataaaaactgcttatgattcaaagggacagaagtggtatgatcttggcttaaatcaatgggtattggcaactaattatactactagctaaaatactcaagctagacaagaaaatacctacactcaaacacaaacgccagctcaacaaactacacaagctagccaaagtcaaagttcatacacttattcaaatgtgaactacacacctaagacgacaacaactagttcatattcatcaaccgcgacaggttccgaagctagtgcaaaggcatggattgcaagcaaagaatctggtggctcatacagtgctagaaatggccaatatgtaggtaagtatcaactttcttcatcttatttgaatggtgattattcagctgctaaccaagaacgtgtagcggataattatgtcaaatctagatatggctcttggagcgctgctaaaagtttctggcaagcaaatggctggtactaatagataactccaagttctgactaagatagatttgttgaaatttcaccttcaacaaacaaagacgactactcgaaatgatccgtaccgtgtcaagtagacagcttaaatatataaattaatttgattaatcagttcgctattgtgcgagctgatttttcttttcatcaatctttttccaaaagtctttatatcttttatcttgttttattggatatgaaattatattctctggattattcttagcttcttttctaacctgacctgcgctcttgccattgaagcgctcctgaggatcataattaatatagtattcaatacttgctttaaaggctttttccatctcttcatagctatttgccttcggataaagaacttctcgcatttctttaattaaaccttgccagccttccattgggccattatcaatacagcggccaattctagacattgattgtggcatgccatgttcttctagctcatgcttaaaaggcatcctggtaaattgaaatcctcgatcactatgaagcattgcatgactattgggctctcttttccaagcagttgacagagcagcgttaactagggctgtatcattgcgcttgcttaaagcatagccaacagggaaacgatcatatagatcaaagatagtacagagataaatcttttgacttgttccaggaattttttcttcagtaatgtcagtgcaccatttttcattgggtttagtggcattgaagtctctatgcaatagattttcggcagtttcttccggtctagcagcttgatagcgatacctcttattaaatctggccttgctagtatagatgccattcacgcacatcaagcgagccacagttctacggtatattttggcctcaccgtctgctagctcattgtttaaagccaaagtcatcttaggagaaccaaagaggctgttattgctctcagctatttctttaatacgcttaagaatcttttgatctcttagttcacgtttgcttggcttatgattaagccatttgtagtaggctgaccgggcaatattggcttgtttgcacatccattcaattgaccacttatattctcggtgacattctttgatcaaactgtaaagagaatttcgctgctgttgtttaagtgctatttgtctttgttttggctgtccagcaaacacatcctttctaattccttcactttttttaggaaggctatctcttggtctttaatatcattttcttttttaagctgttcaatttcacgctttagcctttgagtttcagatagctcagcttcttttaaacgatgaccgcgcctatctgctaagccgtcagttccctttgcgctgtatttttttgaccagttgtatacttgggcatagctgcagccaaatttaagagctgcttccttgtagttccattgatgatccttgcagtatttcactatctgtttacgttcttctagggttgtcttttttctcttagtcatataagcctccagaataggattgtagtccttgagttcttgatgactattatacttgataacccactgctttaactgtgcagcacttcgcaaaccaaacttatttgttagataatcatatgagccttcgccatttaaataggcagctatgcatttgagtttaaaatctttactgtatctttgattatatttatgtggtcttaatgcttctggcccatgatctttaaatgcatatacccattggcgcagtgtagtcttgccagcccctaaaactttcgcaattgaagcaggtgatgcttcgccacttatgtattgtttaactgctttaagcttagcttcatagctaaatttactttttctagacatacaaaaagtcctgctttcatagatagtacaattttatatatttgtactgtctactaaagtaggactatatcaaaatgggtagtcgtttttgcttgtttatttttttaattcaaatttactggtttctacatagagtgtcatatttttacgatagtaatttaaagttttcattgaaagatgtaatttttcaatataatccgcttctcttaattttgaattagacaaaacagagtagacataagacatccgaagcttatgtgtagttaatggcatgccgactattgaacggtcaggggcaatttttgggttaatattaaaatcagaagcgtaatgtttgccatcgcggcgagcaaacagatagggattatcgttattggcaaaattagtgtgattttggatatattctctgacatcattttctttaacttttaccaacaattcatttacatgcaaaatcataatttcttttggcttaaaaccacaagcaatagcagccatcatcttgatagtttcaggatgaatattttttatttgaattaattctgataaatgattttcccagccaataacatagtgttgcttacgattgaagcgattaccacgtaaagtgagcaatggataagtaatgatgtagccatattcattcaaaaaaacaaaatacatctttatgtgactaagatatttatttactgtattacttttcatatggagtttattttcaagtgaatctaaaaagttacgtatatctccagttgtaacattttctacatttgcttcagtagcatctaaactaccagaataataatcccaaaaagttgaaattgaagaacaggctagagaaatagttgaatcggctagtttcttttgttgtttacagtaaatgcgaaatttatcttcatatggaaaagtcaagattgaggctcctttcaaacattcgttaaaaataattatacattatttcaagcacgttgttactaaatttttttattaaataatcaaactgcgtgtcgctttgcgacacgcacacaatacaacttgccaaccaaacagaaaagtcgtatgatgataactgtcaactgaataggcgatgacgttcgccattaaccgagtaaaatctaatgacgtctactttatccgataggggtaaagtagacgtttttttgtgggaggaatctgtttgaattcaaaatttattaattacattagtatcgctattttcgccttttttggtggtatggcacgtgctggtttaaatgcaaacttcagctattatggtactttttggggtaatgtcataggttgctttttattagcgtttttcacctacttttttattgaaactaaagagattaggcagtggcttgtagttggattaggtactggctttgtaggtgcatttactactttttcaacttttaatcttgatgttttaaaaaatatgcaggctaatttgccaatcgaagcagtaatttattactttagctcaattatttttggctttttttttgctatgttaggaatgaaaattggtaaaaaagttggtcaattagtaagaaaggaaaggaatacacgatgaattttttgcttgcaggaattggtgcatcaattggagctatgcttcgttatgctattactaattatggtaaaaagcattgggaatggattggtaataaattttctaatttacctacaccgactttgtttattaacttaactggagtactaattttaggcttgatttttggaattggtgctaacacttttatttatgcattactaggaactggagtaatgggtggctatacaaccttttccactatgaatacagaattagttgagctttataagagtaaaaattatcgtggtcttgtattctacgcggtgtcatcatatctgggtggcttggttctagtttattgcggctattatttaggaaatttactaaaataatgttgacagcatgaaaaaaatgggtttgcttgaacagattaaaaataggggattagtcctagatggtgcaatgtcgtatgaattggaaaaacaaggcgtagatactaataataaattatggaccgcaacagctttgattgatcagttgagcaaagtttatcaagcacattgggattggttaatttttataaaaatggctggttccccaacggctggggtggagtatttacaacaatgctaacagtaaactttgctttttcaggaactgagcttattggcattacggctggtgaagcagagaatcctcagaaagctattcctgaagcaatcaggacaacactttggcgtttaattatcttctttattggctcaattgtagttatggccgcattaattccttatcatacggctggagtaactcaaagcccatttgtgtatgtgcttgacctaattcatgtgccatttgctgcaaatattatgaacttcgtagttttgactgcaattatttctgcggccaattcaggtttgtatgcttcaactaaaatgctttggtcgttgggcaacgaaggaacaattcctaaagcattcaccaaaactaataagcgtggtattccagtattgtcattagtagtaagtatgttagacggaatttttgctttgatttctagtaaagttgctgcctcgacggtttatctagtattagtttctatttctggattagctgttgtattcgtttggacggcgattgcatggtcagaattgaagtttagaagggcatttttaaactcaggtcatcaactcagtgaattgaagtacaagaccccatggtatcctgtaattccatattttgcatttatatcaagcctgctttcttgtgtattaatctggttcgatccaacccaaagagtagcattgtactatacaattccttttgtagctatttgttacttgggacatcatttttggctaaaatctaagaaaaataatgaagaagttttattggaaaaataaaaaagtcactagtgatatatgacactagcaactttctatagcttatatactgcattaaaacaagatcagtatataagcttttttgatacatgtaaaaatttttattcggcgtccttagtcaattcatagatagcttcggcataaatcgcaattgaattaattaggtcatctaccttcatatattcatttgcttggtgcataaccattggagcatcttcaggttgagcgccatatgcaactccatgcttaaataaacgcccataagtcccaccgccgatcacgacttcatgacctttattaccagtctggcgttcataaactttgagcaaggtttgaactaatggatcgtctccaggtacataatgaggttcttcaaatgaagcaaaacttggaattaagatatcaccaaatttttcttcaacttgattaaccatcttatctggatcagtaccttgaggatagcgaatattatctttcaaaacagcatttccattttcctcgtagtcaaacattgatggagcacttgagagatcacccatcaagtcatcatgatgagcaacgcctaattttttgccgttaaagtcttcatgttcaacatcggctaagaaatgaagccagcttttatcgcgaccagcaaaatcaaattgatctagaaatactgccaaaaatgtagccgcatttctaccaacttgaggtgcagatgcatgggcaccttgaccagttaattcaatcttagcttcatcgccctcaatagtgaattcgccttcaagtttattatctgataaaaacttagtatatttttccttcattgtggctaaatcactaccaacaatagttgcataggccttttgaggagttacgttttcggcaatgccggccttgaatgacttaaggattactgatccctttttattgtcatctttaaaggtcatggtcagggtatagatcccttgttcaccgttgataattggaaattcggcatcaggtgagaatacttgatcaggggttggctcatgttttaggtagtaatcaatgccaacccaattagtttcctcattggttcccacaataaaatcaatctttttcttaggttcaaatccagcttctttaagtaaaagcatgccataatatgcagctagggcaggacctttatcatcggcagaacctcgaccaatgattttaccatccttaattaacattttaaaaggatcagttacccagccgtcaccagctggaaccacgtccatgtggccaataatgcctaaacgtttttcaccagtaccatagtcgacacggccagcgtacttgtcaacatttttgatatggaaaccatcacgctgtgcaaacgataagaatttcttcattgctttaactggacctggaccaacaggatactcttcggaagtattattcaaatcctcagatgagtcgattgcgattaattcgtcaagatcacgaagaatgtcgtcctttttggcttgggccaatttcttatagtctaaattcatattctgcctcttttcttattttttgttagctgaaattttaccagaaaaattaatattaaacaattatacatttaaaatgggaaaataatgagcattaaagttgtttttagttaatcgtgtcatgtacactataagaaataatatagataaaaattacagaaagtatatagaaacggaaagattattatgagacaacatgttcctgaactcgatcgcaatttaagtaacgacgaattcctagatctaatcgttgattgtttccattcagtaatttttggtaccgttgatcaaaatggtgatccacataccaatattatcgatattgactttaatgaagatggtcgtctgatttttgcaacgactaatcagaagtcattttatcgccatattaagggacacaataaagtttcaattaccgctttgcgcggaagagaaactctcactagcattggtttcactctagaaggctatgttgatgaggtaagtccacaatatttagaacgaatttataaaatcaaaccaccaatgcatcatatttatgctaataaaactaaagatatgaacactttacgagcttttgcattaacaccaattattggttctgtttatgatttacggtttgatcatgtttttcaaaaacaattcgactttgttaatgttcctagtaagatgcaggttgaaatcttagaataataaaataaacatgcctcgattttcgaactgatcgaagcatgtttattttatatattcatttctttacgttcttcgcgttttcttaagtatggtagtaagaagcctaagccaaagagtacgataactgtaataatattcataattaattggtgattaaaggctgcgctaccgaatgttgcttctgcttcttgaggaataaatcctaaagtagcacagataaaggtaaagattaagcaccaccagcccatgataagggcaccagtcttatttttaatgaagacataatctgagtggaacttctcttggtgcatccgtaacataatgaaagcgaagaatacccaacaagtcttgtatggggaaataataccattgatatttaaaagccaattgtaaattgaattaatatttggcaaagtcccagtaagtaaaagcaagaataaggctaaaccacaagttaaagtgtacgagtgaactggacgacctgttttgtcttttttcccagttaaccattttggcatgaatttgtcggcaacgtcaccggcaaagacacgacttgatgcatcaagtaaaactgctaattgggccatcataaagagggcttgaacaacagcaaagatgtacattaatactttgccccaaccaaggctttcgcctagtagttgaaatgcatagtaaggtccgttcatcttgaaatcatgtggaatatgatgagcattgaaaaacattgctaaagccaaagtaccgaagatagtcaagaatccagtcatcaaagccaacatccacattgctttaggaaattcgtgttttggatcgcgcatttgtacgatataaggagcagcaagttctgcaccagacatggcgaagattagaagaccagtggtagaaaagtaacgtaaactaaatgatggcttaaatgcggccaagttaaatggttgggtagcaatatggtgtccatgcataactgaccaaacagcaagtaaaacaaagagcatagacataataaacattgcaccaccaccaattaaagatagtagttcaagtgaattcttgattgcattttcaaccaaaataaaggcaagaataatgacaaaggtcaaaatcccaaaccaaaaagtagacatatgcttgtctaaagtattgttgcccaaaataatccatgaaaaggacacaataactgaattagaaacatcgaccaaataaggaacagtttgaacccaatacatccatgaagtccagtagcccagtgtatcgttagatgaatgacgtacccaagatgccaatccaccggcttgatcagtaaaggttaggcccatttgactagacatcaatgcataaggaataacgtaggcgaagagtaggaaaatccaagatacaactactgataagccttgattttgaaatggataaaaaatattttcaaaactgataatcgttacgaagtcgatcaatgcaataaccggccatgacatgtagtgttttttgccgggttcgaaattgactgtttcgattgtttctgacataaaaattcctccaagttaagctattttattgttgtgttgacatagctgttctcggaggcgagcaaggcaaatgcacttgttaaaaacctccaatatttatataataatttcagctgtagcgtattttaagaaagaatgcaaaaagtacgctatactgtagaaaaattataaagactttttaaagttttgcaatatgtaaaacggtttcgtggacaaaatggaaagaaaaaggatggattttttgaaaattgccattggaaatggcgtcaatgttaataagatgaaaggttggtcgtcaattccaattggcgatgtacaaaatagtgctgaacttgccgcaattgttgtcaaaaatgatgatgcattaggaataaaacaagcagaagctctaagagaacaatctggctttccgattccattgattaaagtaactgatcaggtagatgaagaccaagtcactcagaaagctacagaatatgaaaagcaaatggtgccaggctttttgaccgacttgatcaattttgctcaagcaaaaccaatttcatttactacaccgggtcaccataatgggcaatattatgacaaacatcctgccggagtagtttttaataagttctttggtaaaaatctaatgtttgccgatacaagtgatactgttcctcaattaggggatacaatgacgcatgctggaacgccacttaatgcagaaaagaaagctgctaaaacttatcatgcagataaggtttacttctgtaccaacggaacgacttcagctaattctatttgcgcaagtgcacttttatctgaaggcgatctagttttatttgatcgaaataatcataaatctttgtataattctgccttggtaatgagcggagcaaagccggtctacattccaactgatcgaaatgcacttggactaattggagaaatggatccagccttcttaactgaagataaaattagagctgaagtagctaagatagatccggcaaaggcaaaggctaagcgtccatttaggttaacaatcgtacaagcagaaacctatgatggagtcttttatgatgcacagtggattattgaccgaatcggtaaactttgtgattatgttctgtttgactgtgcctggggcggctttgaagaattcgtgccaattatgagacatttatcaccacttctacttaacttgggtcctgatgatccaggtattttggttactcagtcattacataaacagcaagcaggtatggctcaagcgtcacagattctaaaaaaggatgctcatattaaaggacaaaaacgatatgttgatcataagcactttaatcatgcttatctgaagtttgttacttccagttatgcatacccactttatgcttcattaacagttaattcctacgttactgctggagcaggaaataaaaagtggtgggatcaaactctgcgaatgggaattgaatggcggaaaaaactactcaaaaagtctaagctatttaagccattagttcctgacaattttgccgaaatttcgactgatgaattggctaccaatgcagaatattgggaaatgggacaaaatacggattggcacggtttccgtaaaatggttccaggcgaagcaatgattgacccattgaagattacggtaaaaactcccgggattgatgttaaaaatgcaaaatatgagaaaacaggtattccaggcgcggtagtggcagaatacttaatggaaaatcatattattcgagctaaaaatgatttgaattcattgttgtttttacttacaccgggagatagtcaagcagaactagatactttacttgaagcttttttaagttttgaaaaacactatctagaagatgacttaatgaaagatgttttgccggttttatataatgagtatccaaagcgttatcaaggctataccctgaaacagttgtgtcaagagatgcatgagtactatcaggaaaataatacttttgtattacagcaaaagctattttctaaatcagggatgcaagactatcaaatgacaccagctacagctgatcagctttttaaaaaagatcaaaatgaactggtcaacctagaaaatgttgttggaagaattgctgccgaaggagctttgccatatcctccaggtgttttcattgttgcacccggtgaaaagtggggaacggtagatcaaaagtactttgaagtcttggcgcatgctattgaaaagtttcctggttttgtgccagagattcagggagtatatctgagcgaaaataataatggtagtttatgcgtacaagcagaagtaatcaaaaataaatagggagttaaaaatgagtttttcttggaaagagaatttaccaaaagagttaaacgataaagtgactaaagttgaaaaaatgatccaacctcgtttagaaaaaattgatgaacaggttttgtataatcaacaacgtgtattggacctatttagaaaacatcatgttggtgaagaagatctagttccatcaacaggctatggttatgacgatataggtcgtgataaaattgaggatatttatgccgattattttaaaacagatgatgctctagttcgtccacaatttggctcaggtactcatgcaattacagttggtcttttcagcatgcttcgcccaggggataccctttattatttaactggaacgccatatgataccattcaagaagtaattggtcttgctggtaataagcccggtaacatgaaggaatggggaattaattttaagactactgaattgaagaatggggaagtagactacgaccaagctaaaaaagatatcatggatccttcaattaaagtagtggcaattcaaagatcattaggttatgcaactcgtaagacttttactatggctaagattaagccaatgcttaagttcattaaagaagttcgtccagatgttaatatttttattgataattgttatggagaattctctgaatgtgaagaaccaactttttatggtgctgatatgatggctggttccctttataagaatgctggtgcaggtttagtaaaaggcggtgcttttttagttggccggcaggatttaattgatggtgctggttcacggttgacagtgccaggagctggaaaaggtgaaggcgcaacttggggttatttgcgcgatatctaccaaggattctttatggcagctcatactactggtgaagctcaaaaaggtatggtctttactgcagccttattagaagaaatggggatgcaggtttcacctaaatggagtgatccacgtagtgatattgttcaaactgtcacttttggtaaacctgatccgatggtaaaattctgtgcggctattcaacactattcaccaatgaattcatttgttgacccaattccatatcatcaggatggttacgaagatgaagttgttatggcttcgggaagtttcgttgaaggatcaacaattgagctttcttctgatggccctttacgtgaaccatacatgctttatattcagggcggtttgtcctatgctcatgataagattgcgattactcatgcagtagaagaaacattttataagtaaatttaactctaaaagattcacatttttctttatttaaaagtgtgaatctttttatcttgtttggggtgaattgttaatttagaataaaaagtagcaatttaactagttaggataagtttatgaatccagaagaagttttaaaagatacatttggctatacaaattttcgcccaggtcaaaaacaagtaattgatttagttttaaaaaagcaaaatgtgttagcggttatgccaaccggtggcggaaaatcaatgtgttatcaaataccagctttgattaattccggtgtaactttggttatttcaccattaatttctttaatgaaagatcaaattgataatttaaagcaaaatggaattaatgcggcagcattaaattctactacaccgcaagaagaggttaatccaattttacgtcaggcatatgaaggcaaaattaagttaatttatattacacctgagcgtttagcgattgattattttagatatcagttaaattttttagatattgatctagttgctgtcgatgaagcacactgtatttcacaatggggacatgattttcgacctgcttatcgtcaattattagatggaatcaattcactaaaaagcagaccaaatatattagctttaacagcgacagccacgcctgcggttcaagatgatatttgtgaacaattgaatattcccaaggagaatatgattgttacctcttttgctcgccctaatatatcgtttaaagtggtcaactcaccacaaaatactccattatatatttcagaatatattaaggcacatcaggataaagcggggattatttacactaatacacgtaaaaaagttgaaagtttgacagattatttggctaagaaaggaatctctgttggtgcttatcatggtggaatggattcttcagaacgaagtcaagtacaagaagcttttcaatttgatgaatttcaagtaattgtagcaactaatgcttttggaatggggatcgataaaagtaatgtcagatttgtgattcatgcctcaagtgcccgtaatatggaaagttactatcaagaagcaggtcgggcaggccgtgatggggaagaaagcaaagcgattttaatctatcatcctggtgacttgcgtcaatatcgctactttattgatgaatcagatgcggatgataaatatcgagaactgcaatatcgtaagttgcaaacaattactgattatgctaatactggtgaatgtttgcagcaatttatcgtccgttattttggtcaagattgtccgccatgtggtaaatgttcaaattgtctaaatcaggataaattgactgacattaccattgatgctcaaaaagtgattagtatggtttatgaactagatggtcgctttggaaaaacgatagttgctcaatgtttgattggctcaaaaaatcatcgcatgcaagaaatgaatgctacacaatataagtcttttggctctctaagaatgaagcaaaaagatgctataagcttgattgactatttaattgcttcaggttatctagaagttgaaggtagcaaatatccactagtgcatgtaactaatcatgggtgggatgtactagatggcaaaactgtagtcaaacggcgaattgctaagatttcagtaactactactcatgctggtgaagaaagtgatactttatttgaagctttaagacaaaagcgtttggaattagctaagcagcaaaaagtaccagcatttatgattttttcagatcgctctttgcacgatatggcacaaattaaaccacaaaatgaaagtgaatttttagaggtaagtggtgtagggcaagcgaagatgaaaaagtatggtcaggctatgatggaaataatcaaaagaaaaggaaaatagctaaaataataatattaaaatacgcgtggtgctagttaaatcgttctagacaataagccaaattataagctaaaattgcaatttccaaccggctttgaaagcctatcagactacgtgctcgattgttctcggcattgtaatagatcagaagcgaaaagtcgctttcaattgttctgcgaatagccatcaattgatgatcattgtgctttttagctcctgtcatatttttacgatatggtgtccaaagttcataacccatttgttttagctgttgatgcagttctttgcctaaatagccttcgtcgccaagaagatagtaattagatggatgggcattttccagcagttcaactgtctccttggcatcatgaactgatgcttttgttacgacataatcaagaatggaaccgtcatcgctaacaatggcatgaactttgaaaccatagaagtaaattttcttggtggccttataaccaatgttggcataaccgcgaaaaattttagcacgatagttgcgaattggttggcaaacaggtaccggaaagctgtcaatgatcaagaaatgtccattcaggtcaacctttttattcatttcttgccgtatctgataaatcaattgcaatagctgacgtgaacgccgattaaaacgtgagtgtgataaacaattgaaacattcacagaatcttctttgtgattcaattcctgtcttagcttgccagataagtaaagccaaaatcagactgtccgtagttttaatttgatcaatatttcgccgatgagtaaactcagccggtgcatacaaacgataccagtgccgacaaattatcactaaatctttaaaactaacttgtaaatggtggctaaaacgcttaagcttaaggcagttcaatcagatcaggctcttttctattattatacaagttgagtctaacaagattggacttttttattaactaaaacttgaaagctaagattaacgctccttccccgcgcctcttggctttttcttatcaaaaataaaaacgcaggatctctctgcgttatactttaagtgtcgacctaaaaagtaaaggagatcctgcgcaatgaacagtatagaacaaatcgacacagaaaatgatactaaatccttaatttcttcatttattaatctaattggtctagctaagttaactaaacaagtcaattttaagcgtaaatccaccgtttcattaaccatgattatctcttggctgatgtcagtacattttgctcggctttctttattcagagctaaggatgacaaacgtttttccgttagaactgctcgcaatgtacttaacgatggaagaatcaactggcaaaaactattatgcttgattgcagcccggctcattggctgcttaaaaccatttatcgataaaagacgccgacttgcttttatcgttgacgatacgctgatggctcggtctttttctaaaaagaccgaattgctagctaaagtctatgaccatgacaagcatgagtatttgaacggatatcgtggtttaactttaggctggagcgatggcaataccttcttgccggttaactttgccttgatgtcaaccaaaaccaagaaaaatatgattggagctgctcccattactgctgatgaacgttcaatttctggtaaaaggagaaatcaagctcagagaaagatgaatgatgtaactgtagagttgattagacaagccttacgattaggagtagaagctaaatacgtcttattcgattcttggttttcttctccaagaatgttttggattttaaagaagatcggtttagatggacttggcatgatcaagaagagttcaaagatttattacatttatcgccatcgccgctatagcgttaaagacttgtatgatcgtttggctgcttcaaacatccgtaaaaagaaacattatctttattcaagcatagttgaggctcaatatcatggacatagctttttattaaagctcgtctttgtctccaaccgtggaaacaagaacaagtatttggttttagctactactcagacaaagcttagccctgaagaaatcatccaactttatggtcgtagatggcaaattgaaacatattttaagacgtctaagcaatatcttgctttagataaatctcaagttcaaagctatgatggccaatgtggctatatcgcagttacagcaataacttatgatctattgacctggcaggaaagacaaaatacagatgataagacaatcggagatttattctatctaatgaacgaatccttacctgatattagattcgtagatgcattggtctacttaatttcagaattaaaagagcttaaacagaatagttttgaaaagatagatgaagtaatcaatgactttattaaccaactgccacgattcatacaaattgcactgaaacagatcatataaaaactaattacgtctaagaaagctcaatagtgacaggacttgagcttgattttggtgctttcaattttcagttattaactaaaacgatttaactagcaccacgcgtattaaaatattggtcaaaccggtctttttttattacaataaatgtaaatgaaagaaggactaaatttatggctaaaaaaacattaattatctattattcttgggaaggcaataccaagaacatggctaaaaagattaacggagaaattgaaaacagcgaattaaaggaagtaactgttgctcctgacgcttttgattcagatatgtacaagaccaacgatattgctctagatcaaattcaaggtaaggttccttatcctgaaattcaaatggatgatatcgattttaataattatgatttgattttagtcggtagccctgtttggtcaggctatcctgcaactccaattaagccattacttgaaaagatgaaaaactaccgtggtgaagttgcatcattctttacctcagcaggcactaaccataaggcttatgtcagtcactttaaagaatgggctaatggtctgaatgttgttggtgttgcacgtgatgatagtgaagtccgcgattgggttaaataattaacctttagaatattaaagtgtctgggaaaaaactaagtctcagatcatgaaaaaagaacgttgaatttttgtttcaacgctctttttgtatacttttagctccagccttgatattattaaatcatcacaaaataaaaaaggtggaaactaacatgtacaagaattatatcacaggtcaaactgctttaacacttaatctagattttgccattccggccaatcatttggctaatgtcatcagctggtttgtagattcaattccagaagatgttttagtaggcaagactgctaaaacgggccgcccagcctatcatccagccatgatgctcaaaatactgctttttgcttactccagaagagttttttctggcagaaagattgagttgatgctggaagaaaatctgccaatgatgatcttggctgaccagcaaaagatttcatatcatactatcaataattttagatcaagcagccatgccaatgaactgattaaaaagagctttatctacttcactaacctgttagaagatgaaggcttaatcaatgaaggtgctgcttttatcgatggtactaagattgaagctgatgctaaccgctatacatttgtctggcgcaaagcggttgaaaagtatcatgaaaagctgaaaggccaggcagttgaactttatgatgaattgattactaaagaagtagtcaaagaaatggaaaaagaaaaagttcaaactagtcaggggctaaaggaattagctcaagaaactgaagcagaaattaacaagctgactaaagagattgagcaggaaaacaaagccattcctggcggttcacctcgaaaagccaagcgacgtggactaaaaaagattctgcaccggctaagaaaagattatgtgccaagaatgcaaaaatatgaagaagccgaagagatctttgccggacgcaacagttattccaaaacagatcatgacgccacctttatgcatatgaaggaagaccacatgaaaaatggtcaattaaagcctggctacaatattcaagcagtcacgaccgatcaatatgtagttgattatgccatctttcctaatccgacagatttcaaaactttggagccggttttggatcaaatgaccgtgttggacaagtttgacaaaatcgtcgccgatgctggctatggcagtgaatacaattattcgatgctggaggaaaaatatccagacaagaagtactttattccctacactatgtatgaaaaagaacagaccaaaaagtataagaatgatccaactaagctaatcaactggtactacaatgaaaaagatgattattacattgatcatcatggcgtcagattcaatttcaaatattacagccagcgcaaggatcgttctactggtcaggtccgtgattttaaggtttatgaggcagacgagttccagctaacgccagaattggaacaattggctaaaacagctagcggccgccagcgccaagttcgctataatcctaactggcaatatttaaaagaaaaagcaaaagaagttctccaaagcgaagaaggcagacacatctatggcatgagaaaatatgatgtagagccagttttcggacatttgaagaacgtatttggcatgcgcagaacgcacctgcgaggtaaagagaaggtcgaaaccgatatcggaattgcctttatgatgatgaatttgaacaaatattgtcaaagaaggtggctgaagggccgatttttattgttaaaaattttaaagagaacaaaaaaacgatcaagattcttaaaaaaggaaatcttgatcgtttttattcatctggaagctagttttttcccagacacttcttttgtattttaagaacaaaaataagagttacaaaatgtaaccctcatttttatttaggacacgaatcaagcgccgttacgcatgactcctagcttgatgggtgtctctaaatatgtggtatttttatatctatcaaaagaaaaaacaacggtttctttaatcaatatcacaacaacacctcatttctatgtctttcaaaagtaagcgcttactttatctacttataatatatcatataacacatatttttaatagtaattttgtcataattttccaaaaattggtttgcttgttggtaattcatgattatagattaaaagagataatgactaaataatggaaaggggatatttaatgacgattccaacgaaaattgaagttcgtggcggacgagtacataacttaaagaatattgacgttgacattcctttgaataaatttgtagcaatttcaggactgtcgggctcaggaaaatcatcactagcaatggggattctttatgaagaaggttcaagacgctatcttgatgctctgtcaacttatatgcgtaggcgaattaaacagggaaatcaggttgatgtaactagcgtcaaacatattccctccgcattagctttacggcagcgtccaagtgtaccaaatgagcgagctacagtaggaaccttgagtgagacttttaatgttttacgcttaattttctctcgtttgggttctccagtttgtcctaatggacaccatttgaagccaagtttggcaattgcaaaggcaatgagtatgtcaggtgagcaaatgggacaattaacttgtccagtctgtggtgtaaaattttatgcaccaagtgccgaacaatttgcttttaattcagatggtgcatgtactgagtgtggcggaactggtaagatacggcaactagatgaatctaaactgattacggatgaaaatttgtcaattaaagatggtgcagttgcatcttggagcttgccaggacggaactttatgcctaacgttgcagaacatgctggtgttaggatcgacattccttataaagatcttactgataaagaaaaagattttgtcttaaatggtcctgaaaagaaatataaaatggactttttatcaggaactggcagggtatttcatgattttaatgccttatatgaaaatgctcggcaagctgtctatcgttcagcaaagagtagcaaatcggaacgtgcgcaaaaaagaatagccgaattctttacttattcgacttgtccactttgtcatggtagtcgtttgaaaccagaattgttacaacagctggtcggtaagcaaaatattaatcaggtggccgaaatgcagttaggtgatttagttacctgggttaaagatgtgcaagcaactttaccaactaatatgcataaaatggctcattcgattattcaggagtttttggataatttgcaaccattattagacttggggctagactatttgactatggctagaagtggaaataccttatcgacaggtgaattgcaacgaattcaattagcaagaacattacgtactgaaactactggaattttatatgttttggatgagccttctattggtctccatcctgctaatgttgcaggattaattaaggttttacgaaagttagttgctcagggcaattcattagtagttgttgatcataatgttgacattattaaagccgctgatgaggtaattgagattggtccaggttcaggtaaaaaaggtggtcagattttggatcaaggttcaattactgcaatcaaacatgatcaacattctttaattcgaccatatttggatggtagtgctaaactacttgccagagagccagccactcgaataaattccgattctattttatttgaagtaaagcaatattttaatttacatgatgtaaaaactaaaatcccactaaaccaattaactgcagtaactggtttttcaggtgccggtaaaactagtttgattctggatagtttagtacccgctattatagcaaaaagccaaagtgaaaaattgccaaaacaaattagtagattttctagcccaatttcaaatgtagtaagtgttgatgcatctccaattggtaaaagtactcggtcaactgtagcaacttatacttcaattatggacaatttacgaaagttatatgctagtcagccactcgctaaaaagaagcattatacatcaagttggttttcatataataataaacaaggagcttgtcctacttgtggtggtacaggaattgtgactcttgacatccaatttttaccagatatgcaacaagtctgttcaacctgtcatggcgatcgttataatcaagatgtacaaaaggtgaagtggcatgatctgtcaattgttgatgtcctaaatctagatgttaatgaggctctaccgatttttgttaaagtgcctaagattgaacgagagctaaaattgttaaaagaagtaggcttggattacttacatttgggagaagatacaccaactttgtcaggtggagaagctcagcgccttaaacttgttactcatcttagtcataaacaaaatgatgcattgtttgttttcgatgaacctacgattggcttgcatcctcttgacgtgaaggttctggtccaagtaatgcaaaagttgttagatcagggagctaccattattacaatcactcatgatttaaatttaattgtcaattgtgattacatgattgatttaggcccacatggtggtaaaaacggtggtcggattgtccaagagggtaagcctttagaattaaagcaaaagcctgaaagtttaacggcacactatttggccaattatttacatgatttcaaaaatctattttaatattatatgaaaatagcattaaataaatttatagcaaactgtagctaaaaaataagacataggaagaaataatatttgaaacagatctaagattaatgcaatattaaatatatattaactatctactcaatttatactaaggtgagaaaaatgaatttgctcaaacagatccgtgatcgaggattaatcttagatggtgcaatgtctacagctcttgagaagttaggcattgatacaaataatgaactttggacagcaattgcattagaacataatcttgctcaaatttatcaagtacatatgaattattttaaggctggagcccagatggcaattactgatacttatcaagcaaatatcccagcttttgaaaaacatggttttacacaagaccaggctactaaattgattactaatgcagttcaaattgccaaaaaagcccgtgatgattttgcaaagacaacgggaattcataattatgtagcggcttcagtaggaccttatggtgcatatttagctcaaggggatgaatttcgcggagattattctctaacaacggaggaatatcttaattttcatttaccacgattgaagattttattggcaaataaacctgattgtctcgcacttgaaactcagcctaaattggatgaagttgtagcaatcttagattggttaaaggaaaatgctccggaaattccagtgtatgtaagttttacattgcatgatacaactaaaattagtgatggcactcctttaaagcgggtagtgcaaaagcttaatgaatatgatcaagtatttgcgattggagccaattgctttaaaccgtttttagcaactgcagtaattgataaaattcatgattttactgataaacaaattgtcatttatcctaacttgggtggcgtttataacgaatttgagcgcaattggattccatttaatgcaaaattcgattttaaaaagttaagccaagagtggtatgaacatggtgctagaataataggtggctgttgttcgactaccgaaaaagaaattggccaaatttccgccttttttaagacaattaacaatgctaaaagcaaatcagttaaatcggagctaaaaaaggttaaaaatgatagcaatatacaaatttgatttttaataattcatatactttttttgaaatttatcaagtaaaaatctttatctttttatttttatttgatatcctgaattgtcaaattaagtgcaacagttaggctatgaggaaatatattgcttgaagagttcttctgctgtgtgatattgaaggattcgacgatgtttgcggttaatggcatcagttgcctgttgaacataagcagctgacttatctttcatgcttttgcctttagggaagaattgacgcagaagtccattgcagttctcattggtgcctctttcccatggagaatatgggtgggcgaagtagatctggcagcctttgatctcggtcatatccgcaaactcagagccattgtcaaacgtgatcgatttaaaccaggcaggatgtctgtcaatctcattttgaagcagcctttggcatgtgcttgcccgatagtcaggaatcttgataactacttcaaagcgtgtggttctttcggtcaaagtcattaaagcaggctgattcttgcgtctgacgcctttaaccagatctccttcccagtgcagcggcgtttttctgtcttcaatctctttaggacgctgttcaatggaattgccaagatgcttcttgtgcaaagcatgaccgctatggccgtgatgacgcttgttcctgcgtcttttgagcttcataggcagatcaatattgcttatgtccagcaagccctgatcaatatagcgatagacagttggtgtgctgggacaagggtagcctggcatagtccttttgaattcaccaacgaattcatcgatgctggtggcatcaaatttagctttaaagcgtctggagagcattctcaaaaagacagcataatgcttcaatggattgcgctgatagcagtttttgcgacgcttctcataataaatctgtgcagtatcagcgtaatagtgctcatacaataaatagctgctgtctctttgcaggacacttccgcgtttgatttcgcgactgattgtcgacttatggcagccgacttcttgagcgataacagtacgggaagttatgccggaatccagcattgcttgaatttgtccacgttgtacgctggttaattgatgatagtgcttagaaatgctagaatttgaattggtcataaagatcttcctttcttgatttttcgtcacttcaagtttaggtcttcatggcctttttgtttaacacttagtgttgcacttcaattttaaatccgggtttttatttgatatcatagtagcggagcgtgtgatgagcgctccgaggatgaaaaggctaagcaagatgtttcttatgacatctgctgataggaagaaatttgaaggtgtagaaaagccattaaggacattttccttagtgactttttctttttgcccaaaataaatagccgacttatcgtcgactatttttaatcttaaaaattatttttgtctgtttgtggagtaactttatcccaaattgcatctactaagccaatccacattaagcccatagcaactgagccgcaaacatcacttggccagtgagcgtagagataaactcttgaaatcattactaaaacaagccaaatagctaataaaacagtgagccagattttagcagttttatttttaactaaagctggaatcaatattagtattagccagaaaacaataatcgccattcctaatgtgtggccactaggaaaactgaagccatcatcagcagctaagtgagcagttggtcgtgcccgttggattatatgtttaacaatccaaccaaaagcatcagctgtaactagtgaaatgacaatacttgccgaaagaggacgctgctttttcagccaaagaatgacagctatcaacagcatccaaactaagtcaactttagtatctgctaaaaatgtaattacatgcataatgctctgcagattaggaatactgtggactaagccttcaaagaaattgtcaaagccggtaacccaacttgcatgagccataatagagaatgcaagaatcaaaaagatcggtaatccgatacaaatagaataaatattttttttgcgcattttttcctcgtttatacttatttttataacaataatgagtttatcatagaatatgagtagaaagagaaaaattttaaatttgccgattgtaaaattaaattgaacacttgatacaaaataaaaaagtccatttggacctgtttgatagaatgttaataaccacaaaaacatctatggaggtcaaaatggactcactacattctatcatggacaagcgtaaaaaaggaacacatctatcgcttgaagagcgggttattattcaaactcgtttgaaagatcattgttctttgcgttccatcgctcgagaaattggctgttcccctagtacaattcactatgagatcaaacgaggggctgttaagctgtatcacggtaaagttaaacgttataaagcccaacaaggtcagagtgtttatcaaaacaatcgtcgatactgtggacgcaaatcggattttcttaagaagcataagtttattgattacgtccaacagcacttttttgaagatggctggtcgctcgacgcctgcagtaatcgctgcactgctgtaggggaatttaccagcaacgatattgtctgcactaggacgctttataattatgtcgatcaaggcttgttaaacatccataactatgatttgccagagaaactcaagcgcaataccaaaattcatcgcattcgtaaaaataagaagaagctaggccgcagtattgaacaacgaccacaggaagttaataagcgtgatgtgtttgggcattgggaatgtgatcttgttttaggccataagaccaaggacgacgaagtgctgctaactttgtctgaacgcatgagccgtgagttcctaattattaaaatcccagataaaacagctgccagtgtaatgaatgcctttaaaagtctgcgcaagcaatacagcgagcattggaacgatatctttaaaactattacgactgataatggttctgaatttgcggatctatctcagctggaagatatttccaaatcactagtttattatgctcatccatatacttcttgtgataaaggcactgtagagaggcataatggccttattcgcagattcattcctaaaggtgactatattcataactactctctccaacaaatcattaatattgaaacttggtgcaattcattgccaagaaagatcttggcttatcatacaccagatgagatctttgaaagagaattagatcgcatctatcaaacagcctaaacaaaagtgttcaagttattattgcaatttacgaaaattttaaattaattggaaaataatcatggaaattaaagagataaaatctaataagaagcagtatatagacttacttttgttagctgatgaacaagagagtatgattgatcgctatttagaacgtggaattatgtatatcttgattgataaaggaaaagttagatctgaatgtgttattacggttgaaaatggtaatacagtagaaataaaaaatatagccacttatccagaagatcaaggtaaagggtatgctaaacatttgattaattttattgctaagaagtatcaaaataaatatcaaattttgcaagttggaacgggtgatagccccttaactattcctttttatgaaaaatgtggttttaaacgctcaggtaagatcaaagatttttttgtaaaaaattatgatcatccgatttttgaagctggacatcagctagtagacatgatttatttaagtaagcgattaaattagaaagtaggctttatcgatggaagaaaatactaaaaaaatgttggcaggtaaaccatatcgcccagatactgaagaactgaaaaagatttccagtttagctcatcgcttatcacgtgattacaacatgactactgatgaagatgaggtagaacggaaagcaattatcgatcgtctttttccgaatcatggtcaaaatgtatatttacaaggaccaattgaagtggattatggccaatttacacacttaggagataatttttattctaatttcaatttgactattttggatacttgtcccgtaacaattggaaataatgtaatgtgtggacctaacgtaacatttgcgactccattgcatcctttgttgccaactcaaagaaatgctcgcaagcaatcagacggaaaaatagccgatattgaatatggagcagctatcactgttggcgataattgttggttagccagcaatgttactgtttgtcccggcgtaaaaattggtaaaaattgcgttattggagctggatcggtagttactaaagatattccagataattcattggcactaggggtaccggctaaagtaatacgtcagattactgatcaagatcatttaaataattatccatattagaaaaagaaaatgtatacgttctcattgattctttatcaaaattgtaaccccaatgaaaaaaataaatgctaatattatgggtagaatttacataacattgctgggggaatttaaaacgaaacgtattaatttaaaaaaaacattaatcaaatcaaccatttggttaactatagctgcttcaatgcctgttggaatggcaattgctaatgccaatagctcgacagttcaggcagcaagttataacaaaactgaaatgcggagctttgttagaaatacattagctagttattatgctcgtggtaccgtagttatagtaaaagatggacaaccacaacaaatttcttatggttatggttattatggcaagcgattaggtgcgggaaacagtaaggtagtttatcctgtttgttctttgcaaaaagtaattaccggcgcaattatcactcaattaatttctgcagggaagtttacacagtatactaagatctctaagtggtatcctaatttaaaaggtgctgataatattaccgtcggcaacttgatgacgcatacttctggattgacagcagctgatactgaagtaaatagaggacgtgtttattcagaagctgatgcaattaattgggttgttaataagctaaactcaactacgcaaaatcaacctggtaatttttcatacaataataccaactatattttgttagctggaattatacgtcaagaaactggacaaagctacaagcaaaatgtgcaggaacgaattattaataagcttggcttaaagcgaacttatttcttggaagatattccagccgggatgacggatggtatctcatatacctggaatcaaaagaattaccaatgggctcaatatgttaaaaagactcaagcttctcaattggtaggtgctggtaatttgttctcagctccaatggactattaccgtattcaacttggtttaaccaatgggcaaattttgagtcgaacagactttgattatatgactcatttaacatcacgttcatcaaatggttattcaggtggtttatatatgaagaataatgataacttgaagttagcatatggtaacttatataatactcactttggtaactggattcagatgactacagataatcaaaatggtttgattatgttcttaaatcaaactcaaaatgatgaaaacagaaataaacaaattggttatcaaattttgaatcatatcaaggctaatacatttagcgcaaaataaaatttttcatgctttaaacttcatgttaagcttaaagcagggtttttttgattggagtaaaaaagatggttaatggtggcgtattagttagccaagatttatcttgtgctggtcaagtatcacttagtgcagctttacccgttttaggagcatgtggcttgagcccgaccgtattgcctactgcaattttgtctacacatacgggtggctttggtgagaatacttttttaagtttgaataatgaaatggctaagattatggcccattggcaaaaggttggttttgatttttcagctgtatacttaggctatttgggcaaaagagcattagatttttggacagaaaagattagctattttaaacaaaaaaataaattgatcttgattgatccagtaatgggtgatcacggtcaactttatcgtggcattgatgaaaactatgtaataaagatgcgaaatctagttaagtcggctacgattttaacgccgaatatgacagaagcagcatttttattaggcaaaaaggcaactagtaattcattgaaaacagcaacagaatttgcggctgaattatctagtcaatttggtgtctcgaatgtcataattaccggtatttcacttaataaggaaaaaattgcggaagttggaattacagccgatcatagttggtctttaattcagaaaaaactcccaggtaattattttggtacgggagatttgtttgcaagtgcattttttgctgctttaatgcataaagaaaatttagaaaaagcgtgttcaattgcggccgattttgttgcacaagcaatcagggaaacacccaagcaagattcacgtctaggaccaaattatgcagcagctttaccagatttactgaagagatggagtaataattaataatgcagatatttagagaaaacaagaattctttacaagctttagttttaacgggactttttgcggcaattatttatattgggatctgggtgttaagaatccccgttcctgctatggtaggacgcccatttattcattttggaaatacgctaactgctgtagcaattttatatttaggttatcgtaatggtatgattgcgggaattattggtctaggtggttttgatttgttaaatggctatgccgcaacatcatggttaactatgcttgaggtagtagtagtggcttcggttttgacagcagtttatcgaggaatgcactatcaagatagtaaaagaaatattattattttaggtattattgcaggggtaactaagatattcactacttattgcgtttcaattgttgaagctttaatggtggggacgagctttaaagtagcgttagttggagcctttgttagtttgcctgcaactgtaatcaattcaatttctactgcaatttgtacaccaattttatattttgctttgcgggatgctagtcgtctaattataaaaaaggttagataaatcaatagattttacacgaaatttgcaaggtgctatattaaagatattattactggcataaaaggtaggatagtatgaacgaagacctaaagaaaaagaataaacgaaacaatattattattttaacgattgcagttttaattatcgttggagtaatcgcgggttttggcattcataatcaccgtgtggcaacacaagctgcagcagaaaaatatgctaaaactcactttaaccctaatgttacaatcgatggagttaaagtaggaaagctaaccgttactaaggcaatggctaaagttaaccaaaaagctaaaaatcaagttgagttaaaaaataacaaactggtttatagctataacactacagtccaatcattagatgagtccgagacaaaggccttttttaagaagcaacaaactaaaattccatcgactcagacttataagtttactactagtaatttagctacagctaaaaagaaactaactgacttaagcaaagcagagattacttataaaattaatggcaaaaactatcaattaaaggccaaagatttattgaataatgtgacttatcgagataatcgctatcaatttggtgatactagtaaattaacgactaagttaaatcaaattgataaagaagtttcaacattacacaagagctataaatttacagtgccaaagggcaataaagttaaaggcaaaaccataacggtaaagaataagacttggggttggggcgtttatgttaaaaagacgcaacgcttacttctcgaagcatttgccaaaggccaaaaaaattttgatggtgcagatgcactttacggtttaggctacagcacttatcctcacggctatggttattcaaataaagagattggtgatacttatgctgttgtatcattgaaaaagcaagaagtatggttgatcaaaaagggtaaactagccgttcatcttcgtgatgttgttaccggtactatggaaggttctaagggtgatcaaactccgcgtggggtgtggtatatccactataaggaatcaccaagtacattgcgtgggaccaatgatgatggttcaagttatgcttctccagttaagtattggatgccatttaccttaagtggctgtggttttcacgatgcctcttggcggactgattggagcaagaccgcttacctaaagggtggctcacatggttgtgttaatgttaaaccaagtgagattcgaagcgtttggaacaatattaaaaagggcgaacctgtaattatttacgaataacatgtttaagggatccattaagttggatccttttttatgaaacaatttttataaagtgaaaagctatttgattacttggaaaaacagctaaatgtaaacaataaacgtgaaacatggctctgaagcccgatattaccgcgattgtggataaaaatataggtaattcacatctattactaactcaattaatatttttttgaaaaaagagtagaaagatgaacctttgtttgatataatttttatgcgaactaatggtctaaaaatagaaagatgagatgataatagctatgatgcaacaagaggaattagaatcacaggaagaaaaagttaagttttttgatgaagactggttgaattggaactaaaatctttaaatgtataattcacttctgtataattaaagaaaaataaaaatttattaactctttcacctaaaggagtaaattatgcaagtaagaactagatgttttcaaagtttagattacgaagatttgtgccgggttcatgatgcggctcgtttgcaagaaatgaaaataggcggagtggagaaatattttattccgtttaaggaagcaccatactggtataatttctttgattctgagattaggattgtagaagttaataatgaatttgctggctttgctgcgtataagccacataatttagcttatttttatattgatcctcaatttcaacgacgtggtattggtgatcaattgctagcttcagtgttaccaaatattagacggccgattaggctagaagtctttagcgcaaatatagcagctaaagcgctgtatgcaaagcatggttttaaaattatcaaaacagttaaagagtcgtggtggtcagaccccaagtctgagccagtttcaagtgatacgatggaattaatgtaagaaggaatatgatatgagtttttataatttagattatgaagaaaaacggtttattcagttagctaaaaagaatactcgctcatattatgaacatcatgatcagattccttcctcacctggccaagttgagctggccaaggaactagtaaaggaaatgaaagagcttgggcttgatgcttactataatgaaaaaacagcttttgcaattggaaagttaagtgcaaacacagcagaaaaggtaacgcctattggcttctttgctcacgtggatactgcagactttaacgcagttaatattaagccacaaattcacgaaaattatgatggtcagaaaattatcctagatgagaaagataatattgttcttgatccaaccgagtttccagacttattaaatctaaaaggacaaaccttaattacttctgatggtcatactttgctaggagttgatgataaggctggaatcactggggcattagcaatgcttaaatatttaactgaacatcctgaaattgaacacggtgatgtttttgttgcttttggtccagacgaagaaattggctgtggtggtcaatattttgatccagctgattttcctaatgtagaattcgcttatacgttagacaatgggcggccaggagattttgaatacgatacctttaatgcgtcagagattacgatccatattaaagggactgtagttcaccctggtgaagcatatggtctgatggttaacgcaacaactttgatgaatgattttttgtctaatttacctcaggatcaagtgcctgaaaagtcacgtaatcatgatggttatttcttggttctacatgctcaaagcaatgttgatcatgctgacattagcatgattattcgtgattttgatcaaagtgaatataaccgtaaagaacagtttattcgcgatctagttaaaaagatgaacaaaaagtatggcaatagatttactgtaaatattcgtgaacaatatgaaaatatctacaactatattaaggacaagccatatattgtaaatctggctcttgatgcttatcgcaagtctggactaaagccaaatgtacaatcctttagaggtggaactgatggaaactttatttcgcctaaaggaattcctacacctaacttatttaatggtggtggcaattatcatggccgatacgaatatgtgactgttgagcagattgataaattagccgaagtgttgactaatattgtgactgaacatttgcgtcaaactcgcactggtaggaatgaaaagccactagaaaaatattggtagatttaatagccgctttatttaacaaattaatactgtagcattaggatataagtggctagatgaaatatccttcctccttagaagtgataaataccattttcttcattgataatcttgctacatattgcagtgacgctgtatttgcgccgctgcttttttgttattattggtaataaaatacgtaaaaagtacgtaaagttttttcgattagcatttaacaaataacttaaatagaactaccatataggtggctggacgagaatcttctctcgtagaagcaattaataaaccaattttcttcatttataatctaaccaaaaaggacagggatgctcaattgcattgctgtcctttatttttgataatcttcgccgtaaatataacgatgtaattttaggtattgctcatataatctgcgttcattttgattgtcttttggaaaataatattgtttgcctttgagtcccttgggcatataattttgcttggcgatttgatgcggagcttgaaaaggtgactcagctaggccagctcccgtgatttctttagcgtgtttataatgaaagtcacgcaaactattaggcatgggataccgaatgggatgatcactatcttgatcaagtctttcccaaatttcctcaaatgctcctgattttggcgaaatacacattaacattgttgcaaacattagtggatatttagctttaggcattcctatcttttcagcttgattagctgcagtaacaatttgagttacttgttgcggattagctaagccaatataagtatatggaatctcacgcagacgccgtacaaccgaagctaaatctccattttttagcaaaatagcaagataataaagtgcagcatctgtgtcagagccagccatagagtcagaatatgcagctaaataatcgtaatgtttagtggctttcttatcatagctaaagaattgctgcttagtaaacgatttaacatttgctaaggtgatctttttaggattaagtgcatgaacagtctctaaaatgtttaaagcaattcgtaggtcgccatcagctgcggctgctatcaaatttaacgaatttttttcaacttggtgatctactaatttaaggaccttagtacatgccttgttcaaaacagctgcaatatcgtcttctgttagaggattgaactcaaagatttgacaacgtgaccgcacagctggcacaatcgacataattggattttcagtggtagagccaacaagtagaacatgaccattttctaaataaggtaataaaaaatcttgtagatttttggtcatacggtggatttcatcaattaaaagaacgaaggtctgatacttataagcattaataatgttgttcaactgtgctttattatcaattgaagcattaaaggaagcaaagggataatcattctctttagcaataatttgagctaagcttgtctttccggtaccaggaggcccccagagaagtaaagaaatattaacatgctgcttgataatatttcttaaagcctttcctggtcccagcaactcactttggcctaccatatccgccaatgtttgcggcctcatttgttcggcaattggtgttttaaaattcatcaaattccttctttcagtaaggtaagtatactattttctacaatttttttgtaaaaatagcttgtactatcaaaaagtaagttatataatagaactaatgtacgagaagttaacgagtttttttagaaagaggcgtattgtatgattactctttatatgtcaacaagtagtgcatcttcacgtaaggcgagagcatggcttaacaaatatcatctttctttcaaggaaaagaacgtctttaaggaattatctaaagaagatgtccttcatctgttgtctttaactgaaaatggaactgaggatattttatctactcgttcacagtctttcaaacaattaaagaataagttgaatgaagacttgtcattgtctaaaatggttgctttaattactcagaatccaggattattaaagagacctattattgcagacgaccatcggatgcaggtgggctataatgaagaagatattcgtcagttcttgcctcgtgatatcagaaaagctgaattaattgaggcacaacggattgctgatgctgcttaaataagacaaaaaacgatgaatttacctttgtgggtgattcatcgttttattttgctctaaatttttatttagctgaacctgggcgttgcttcttggctacttttttacccatagtcatgttgtcattatatccccatacccaaactgcaataaatgaaactataattgaaacagcactggcaattaggaaagtatagaaactatttagttgagtaggatgggccgggttgaaaaagcttgagaagccaattagaccaccggtaaagccatacatagtaccatgcattaaaccagtaactaggccaccgaaggctgagccaatacaacctgaagcaaagaccttcttatatcttaagttaatcccataaatagcgggttcagtaacaccgcagaaggctgaaatagctgctgcaattcctagctctttcatgtctgctttctttgatttgattgcgactgcaagaacagctgcaccttgggaaaccattgttgcgcagataattgcgtttaatgagctttgaccagttgaggcaatttgttgagcaactagtggcacaacgccccagtgaagaccaaaaataaccaataactgataaaaggcaccgattattaagccgccaacccagccagatgcagatactagccagttaataaagactgcgataccatttgcggctccttgaatgattggaccggtaataactaatgtgatagttgaaactacaaggatagtaattaatggggtaaagatcatttgcaagtaactaggcaaaactttctttaaccactgttcacattctttagctagccaagcagctaaaatcattggaaagatagagtaggaatagtttaagaattggaagttccaagatccaagactaaacattgtcgtcatactcttgccccaagtaatcatttgtggataaactaagaaaccgccaattactgcagcaatcattggatcggatcctaaccgcttagcggctgcaaatcctactagaactggtagaaagaagaaagcagagtcggccatagcactaactgtgacatagaccggactcttgacgctaagtaaagcaccaagttgtggaagggtgagtagtgcaagtaagcctttgatgatacccgatgctgcaataacaccgattacaggactcattgagccggtaataaaaccaattagattactaaaggctctagaaacaggatttttaccatcatcctgattattagtttaaggtgaaggattgtcactaagaccaggcaattgtttcataactgcatcgtaaacattggtaacctcattaccgattacgacttgatattgaccaccagcatgcataacgtcaagtatgccacgttgattttttaaaatatcatcattggctttagactcatctttcaaataaaagcgcaaacgtgtgatacagtgaatcaggttatttatattatctttaccaccaacattcttaataatgaaagtagctaattcatcatacgaaagtttcttgtctgaactatcttcttttgactcctttaaataagctcgagcaactgtatcgccagcttctgctttaccttcagttacatctaagccatcaagtttcatagatgaattggtgattaaagtcataatcgtagtatcaagatcttttgctttaatcatctctatattcatcgtggcaatttggtcaccagctttaacttcctgaccatttttaattactacatcaaacggttcacctttaagtccaaccgtatcaactcccatgtggaccaatacttctagaccatctttagtagtaattccgatcgcatgctttgtttcagcaatcattgagatagtgccgctaactggtgcaagaactgtattatcagttggtgttaaaccaaaaccatcacccatagttcctttgctaaagataggatcacttgttttacttagtgcaattacttgaccattagcaggagcaagtaatgcaatttcgtttttattcataagtgttattcttcctttcctataaaagcgttttcacaaaattcatttattataatattcctgtacgtacaagttgtcaatagatttttatgaaaatgattacatgcctgcaatatagtttttagatatatctattgacatgtacgtacatcaaaaatataatgaacatgattttaagaaaggacaaggtcaagatgactaaagcaaaatctgaactgatcgctcaagacttagcttctaagattaaacatcaacaatttaaggaaggcgagcgcttgcctagtgaaaatcaattgacagagctttatggcgcgtcacgcgaaacagtccgtaaagctttgcagcaattgacctcgttaggattaatccaaaaaatcaagggcaaaggttcgattgtccttaatttggaaaagttttcgtttcctatttcaggaatttctagctttgcggaattaaataaatcattaggaatgaatgcaaaaactaagctacttaatgatgaaatggttgatgatttgccggcaattttcaagaaattcttccctgaacaaaagaagcatgctgggatctatgttgaacgtttaagaatgattaacgatgaaccagaagtgctggactgtgatttcttatttaatccaccaattactgagctgccgccagaagaagcagaaaaatcaatctacaattatttagaaaataaattagggctagatatatcctatgcaactaaggcaattacggtagaagaaatcgatgctgatttacaagagaaattgcaattggatagtaaggaagcagtactagtagctagtcataattttttagcagatacaacgctgtttcagttaactttatcctttcataatcctaaaaagtttaaatttattgactttgctcgtagacagaaaattaagttataggagataaaaatgacagatttaggcaaaaaagtaatttaccaaatttatcccaaatctttttatgattctaatggcgatggagtaggtgatattccagggatcatcgctaaaatcgattacatcaagaagcttaacgttgatatgatctggtttaatcccttttttgtatcccctcagaatgatggcggttatgacattgcggattattaccgaattgatcctcgctttggcacaatgtctgactttgaggaattaactaaaaagctaaaagaaataggcgttggcgtcatgttggatatggtgctaaaccattgttcaaccgaaaatatatggtttaaaaaagctttggcaggagacgaaaagtaccgcaaattcttttacttaagaaaagctaagcctgacggctccttgcctaataattggcaaagtaagtttggtggaccagcttgggcaaaatttggtgatacggattattattacctacatttatatgatccaactcaagcagatctcgattggcataacccagaagttcgtcaagaattgttcaaagtaattaacttctggcgttcaaagggagtacatggtttccgttttgacgtaattaacgtgaccggtaaggatgaaaagttagttgattcaactggtgatccaagtcaggaaaagagtctttatactgatacagcagtagtgcatcaatatttgaaagaaatgaatcgctctacttttggtcaagatcctgactcaattacggtgggtgaaatgtcttcaactactattgctaattcgattgagtactctaagccgagtgagcatgaattgtccatggtctttactttccatcatttaaaagtcgattataaaaatggtgaaaagtggtctaaagagccgtttgatttcatgaaattaaagcacttatttactgaatggcaagaaaaaatggatcaaggtggcggttggaatgctttgttctggaacaatcatgaccagccgtgggcccttaaccgttttggtgatactggtaaatatcgagagaaatcttccgaaatgcttgctactgcgatacattgtatgcgcggaactccttacatttatatgggcgaagaaataggaatgatggatccacattattcttcaattcatgattatgtagatgttgaagctaaaaatgcttttgcggcattgaaacaaaagggaataagcgatgatgaagcatttgcaatagtaaaaactaaagcacgagataactctcgtgtgccgatgcactgggatgatagtaaatttgctggctttagtgaatcaaagccatggcttttaccaacagatcaagatagaattaatgttgaaaaagaattacacgagggtgaaatttttgcttactatcaaaaattgatcaagttgcgtaagcacgaacaactgatttctgatggccatattagaatgtttttaaaagatgatccacaaattttttcctatgaacgttttttgaaagatgaagctaaaaaaatattagttttcactaatttctatggtactgatcatgtagcaccattgcctgaacaatatcaaaataagaattatcaactcgtattgagcaattattctgcacaagatggcaaactaggagagaatatctcattgaagccatatgaagctttagtaattaaaattaattagactagtataattaattgtgttaaggtaaaaatgttcgtgaagatttcgatttacggacgaggaattcgcgagaagtcatgattttcaggtcatggcttctttttttgcataataattaaaattatgtaaagtaattgacagcttgcttataatagatagtagagagaaggaaaaacgatgttagttgattctgatagttttatttcagttgaaaagaagctaatcaaacaaggcaagttgcaaaaatttgaaaaagaaaatggtccagttaccagtttaatgatgattagtaaaggaaaaattgcggacgatatgcgttatcagttagtcgagaacttggcacatcatccattacatatagtctacaaggcctcatttgatcaatatgatgaaaccctgaattgtattttcgatcgacaaactaaaaagccaatcacaggtttatggtacacgccgcaaagaagagactttactgaaccgcctaagaaaatggtccagctttttatcagtgaaattgtaaataatttgactgattcaacaggaatagatttgccaatctgggtctttatcaatgataaggcacatttggcagttactaagaaagatttgagttaagaaaaaaatcagtgcgaaccctatgtgaacataaaaatgagggagtttcgcactgattttgttttgtattttatgtgttaactcttctttatatacttttgacatagtataatagttgatgaagccaaatatttaggattggatgaaatacatttgccccagtcaaaagtaggttctttgcacgtcgcactctatgtgagtgcttaaattaaattcaactcttgcaaatgcaaaaaagcatccctaatcaaaatagagaagagggatgcttttttaatatcattattgacgccaagcgctatctaatttttgttgaccagccttaatttgagcattaacattttgatgcttatttgcagcaattaaaatattttccataatttgattcataccattataagcagagtcagaattcttagctacaggaacactgtagagatgcttcattgaatcctttaagacacttggcaatttcatcttgctgtctaagtattccttactatttaagacattatcgttaacaggaatatagccagtctcattagcccaagttaattggctagatttgctagtcaaaaacttcatatatttcatggcagcatttttttgtgcttttgaagcatggttaaagacataaagatcagtcccttgagaaatagtgtattcaccgggacgaggagcaacgccgtacgtaaacttgttgcctacacccatcttagtgtagctttcaccagctgaagtaccgatgtacattgcgactttttcattagaaaaaggaccggagaggtaacgttcactaccagcagttctaaagtagccattgcgtacgccatctgcgtagaagttaataattttcttagaggcagccgaatctaacttgattgaacgaccaaaagtttgtccttcattcttgagacctagaacatagtagttggctaagttatcaaaaccagcaccaacaattttatggttggacttttcataaattgctttagaaacagacttaagttctgccattgttttaggtacctttaaaccatatttcttaagtaaggtcttgttataagtcaagacttcaatagatttgttgaagggaataccatattgaacgccattaatttgcgcacccttcattaattcaggacgaatattagatttggctactgagccccaaccataagttgaattattaatgtatggagtcaaattgaccaacatcttattttgcgcagcttgataaagccaaccaggataagcttgagtcattgttggtaagttattaggattttgttgagtagaagtaattttcccttgtaactgagggtaattaccttgattttctagcttaactttgatgttaggattttctttttcaaatttattagtcaattgtttcaaagttttttgttgtgcaccattcattgcgtgccacatagtaatttctgtcttactatttttagcagatgtagtgctcttttgatttgaacaagctgctaaaaataatgctgcagtagttactgcaccaattgataaatattttgttaagcctttctttgtcatcgaattctcctcactaaaaataacattaataaaaatgaaatttaaaatatatttttattttaataagcacaatatcttgtatcacttattaactaatgcaagataatatactactggctaaaaaataaaattcaatccttgactttttgccagcatttataagcattgatatatcaacgactgtttacttaataaaaatattagtagcaagagaaatttaattaaaaacacattttattaaatacaatatcttgtgtatgataaatgtaagaatcaattaagctaaggcaaaataatagctattttatagcaaatatcttataattaataatgaacttaagaaaagaaaggtcgaattttatgaaaaaattagatactactaagcttactgatgaacaaattgaattttttaactcacacttaccatacatggcaactgtgaatgctaacggtgtgccacaagttggtcctaaggcttcacttaaggcaattgatgcttcaactattcaatatcttgaaaagactaagtcaactgcttatgcaaacttgaagaatggttcagtagcagctattgttgtcgctgatgttcctactcataaggcatttcgtgttttaggacatgctgaaattcatgaaggcgacgattacgctaagaagatcgtttcaggcactgatactcctgaagcattcgtagttaacattaagatcgaagaaatcgacgcttaattcaatattttatcgcaatgaggcatccctagcagggatgccttttttgttggtataatgatgagtagttaaagtgaaaatagatttttgaaaaaggtaaattgtgattactagtaaaaagaagccaattctttggttattatcagatacacatctaattgcagatagtttacatgatgatggtcttgcttttcagcatatgcgcaacactagtgcaggtaaagacttagattatcaggagattgctttgaccgcgtttgtacgtaaagtaatccaagagaagcccactgcagtgataattactggtgatgtaacctttaatggcgctaaaatatcaggagaacgtttagctaatatttttaagccattaactaaaaataaaattgcattcttagttttaccaggaaatcatgatatttttgacggctgggctcgcaagtttaaaggtgatcatgaagattacaccccgcaaattagcccagctatttggaaagagatctttgctgattcttatcattatgctttacatgaagatcctgattcactggcttatagcgttaatctgaataagcagtatcgactaatattggctgactcaaatatttatggcaagcaggaatcacaaactcatctgattactaacggtcgaatttcagaatctcaaatgaactggattgaaaaagaattaattgatgcgcagcaaaagcagcaacaagtgctattctttatgcatcataatctgtatcgccataataaagtaatctatcagggatatattcttgataatgcacttgcactgcaaggtttattacaaaaatataatgtaaaagcagtcttttctggccatatgcacgcacagaatattattggtccgtttgctaatcgaccaattgcggaggtagcaggagcttgtttttgtatgactaagcaggaatatggtcagctatatttagacgaagcggggatgcaatatcaggtgcattccttcaaaatggaatcgtggttaactgcggaagaaaagcaaaaagtgccaacagatttttcgcaatatttgaagcatttgttttttagtttggatgaaaagcaactaaatcagattgcgcaagctttatcagataaaaatgatgctaacgtggtcataaaatttatagatcaattgaattggaacttttttgtaggtgaaagtaattattctgcagcccaaaagaaagaaattgttaattcacgagaatatcatttgattgccaaatatttacctggttttaagcgctacgttgattcatttttacaggtagagcaaagtagccataaactgaagcttaagtggtagtgagattagttgctgtaaaacggaaacttctattatgaaaaacgatacagtagaacaaattacgccgagatcggcctctaagtctgttttaccagcaaccggtaggcaagatagtgatctttcatggttagggttattactgtctggcttgagtttaagtggattatggactcgtaagaagaaaacaaaataaaatcgaaagagattgagacactgggttcaatgtcattaagttaagacattgacaaattatcgacttggacttttaagatcattcatttgcgatttatcgcatttgaatgctcttttttcatgccaaataaacccaaatcttgtttagaaattaggctacacgatataaataatatacagctgatttgggtttgagatttcttttgtcttttcgtcctggtctgatcggaattgtgtaatgactaatttgaataagaatctttttaaagatttcagttgaagaagaaattatatacatagcctggatgacaaaacatgactgtttgaaattgatcgcatattgatacttgcattttttttgtggtacatatgcttgagcatcaatttgactgactgcgttaaacataatcatgtgggcatagatctccatttcaataaatctatcctgcttggaatgaaactgtacgctacctaaagcatatttcaactttttgaatgaagtttcaatgccccagcgcaaatggtagatttctttgatcctttttaagggataatcggctctatttagattagttagaacaacttcccattcttctttgcctgatttaggatcattaattctaaatttacaggcacgaaattttattgtacataactctccaaagtcccagctgccatctttggtatttttagaccgatattttatatattgacggtaatgatggttaaccaaatgaacgttttctgtagccttatgggtttcataataataattagaggtagtcacccagcaagctatatccttatcacactcttgattaggcaactcagctacttccttaaatgcgccatatcccgttttagtacgtatgacataataacagttaggcaggcgattacaattttcaatcatgttaaagccggtataacctcgatccatagtaactatatatggtccgcaatttagctttttaagcatttgaacggcggctttacgttcatccatctttgacttaggctgaaagatgcagtcttgataagtattatttaacaggtcatagagtgcattaacatgaatttggcaatatggctttcctttatgattgagatttccaacgatattctctgatttaggattccagatttgattaaaatcagacccatcaatggcaaatatacgatatttatgatcaaataactggatattaaataaattctgattaaatacagttagaatatgcttaaaacatgcgggtgaaagctgacctttgcgttggacataagcggaagtactgactactttatcgttatttttaatagctttttggccaaaagctctaaacaactcactggtcaaatcttttccttgcatattaatagtagttttaatgactgtagctgcatctaaaaaccgcttcctagtgaaggcatgaggatcatcgataaaatcatgaatatgctttccagtatcattgataatttgatcaagacgatctaaaatatttctgtgaagggctttcataattaacaccagctttctggcaataattttgaaggtttaataatttaatcagagggcgaaaaggtaggttcttttcgcctttattttatgcaaaaaaagaaccaaatcataatgattcggttctacagagattagattcaatttgtcaatgtcttaacttaatgacattgacactgggtttcgatctcttttttgataggctcaatatcaaggaataaataactataactgctataatgatgatatgagtactaactgatcaaatcttaactgcatttattagatcgaaggttcattatgaaaatcaataaaaaacttatcttaatttctactgcgttattggctgtgtctccaattgccgcagcaccactaacttcaaacgttcaaacatcagttgccgcagctactaaaagcaatgcaactggttccttaaaagtcattgattcacatattatgttgtacaatcgctcgggcaattatttggatcatatttctgcacctaagaaaggcagcacgattaaatactatggaaaaccattttttaagacggttgatccaggcgactacagtgctggtgagttatactatcctttacgcaagaatgtttatatttcttcagattatgtaacgccaatatctggccctgcttatttaacggcaatttttaatgccaatatttacaataagtctggcaaaaaagttggttttgtcaaaaagggtagcgtagtcaaatatgctggtaagcggaaaactactagtagtaaagcaaagtattattatgaggctcaaaaaggtaagtatcgcattccttataccataattaatggaaaagactactattatttaggttccggtcgttatatcaaggtggccaacatcggttacattgacggctatcgtcttactactcatgcaccaattaccgtaacggtcaataagaatacttcaaccattacaaagtatgttaattcaacaggttggggtacagatccaaataatattgaattgaagaaaggacaaaagatcacagttgattatgcgggacaattcccacaacaattgacagactttgatcatgatcactattcatactaccggatcaagggcactaattattgggtatcagaagatgatctgaatttgccacaagctttagagaatcattcagatcttgaattggccgattctaccaaagttgtcttggataaaaagattcctttgtacaatgttgacggtgaaaaaactagccaagagctatctaaacagttttataccaatacggttgaagaaactgcaatgtatagcaaccataaaattaacgaagccctttatctttgggtgccaagtgaaaagaaagccgaacttttctaccatacaacaggtgaagttaatgctaagactaataagttagataatgaaggctatatcttagctagtgatgtcaaaaaggttgaaggtgtgaagcttacaccaataaacacagctggcgaagcagagtcacttgctaaagtggcaactaacaaagcatcgttgactgctgcaatctccactgcagaaaatgtgcaaaagacagatcgctatcagttagctgattatgataagaagattgaatttacaacttatttacagcaagctaaggctattgctagtgatgcagatgctagtgaaattgcagttagtcaagcagaaaagtttttaactaatagcaccaaagcacttgatggtaaaaaattacttgttagacgaactgaccagttaactacttatgaggttcaaaaagtgttgaatcttatctacaattactatcagccgcaagttacaggcaaacttaacgttcaactttataacagcaaacgtaattggcaatatccaacaactcgtccagtatgggatgttaccaagaagagtccattttggtttggctattcttcagataccattagaaagcgcaaagtcgatattagcccattaatcactgatggcattactgttggcaagaaaaagaaattgcaaagtaatgcatacgtttataccgctgcaggtgtgaaaactagaaagctgttgaagaagaatacttcttataagattcaagccattacaactattaaagggcaaaaatatgtcaagattggtgcaaataaatacgttaagtatggcaacttcgaagcatctaagctaaaagtggtcaaacgttactacactgtccaaactgtaacacctgtggtaaatgcccagggtaaaaaagttgacgaaatcaagtcaaagaataccaggacaaagaattatgtccaaacttatggcaccaagaggatcaaaggctatgattacattaagataggtagtaatcgctataccaatatgttgggatttgaatatgttttagcgaagtagggttcgattgattatttagtttatgttaaaagaagcactgtgttggtgcttctttttttgtacctacactacttgttattaaatggggcttcggggtagaataaaactatatttactttaatatttagaggaaaaacaatgtctaactttgaaacttcacaaaaagattatcaagaatacgcaaaattggcttccagcgctgaaagcttaatttactctgatcctagaagtagtttgacagttttcggaacttttggtgagcaattaactaaggaaatcatgcatttggatgatttaggtgattgggaattaaaccaaaaacaacgaattgaaaaaatggcatattctaagaatgaatatccacctactgttttgaatgctcttaatttgatcaggttaagacggaacaaggcaacgcatgacgatcattttattgctacccaaaagattgcgcttgaaattgatcagagtgcttatttggtatggaaatggtttttagaagtttattctctggataaagttgcagattatgttgagccacaagatcaaaaagctttaattaaaactcaagaagataaaatcaaagctctcgaagaaaagataaagcaattacaacaaaatagggtgcaggaagtcataatttctcctgaagagcgtgaacgcagacgccagattaacgttcaatttgctaaaaaacatgagttaactgaagcagaaacacgtcagttaattgatcaacaattgcgagatgcgggctgggaagtagattcacaaaaattgaacaattggacgcagaaaactgaaccgcaaaaaggtcacaatatggcaattgctgaatgggttctacctaatggtcagcgagcagattatgcattattcaaaggtttggagttctacggaattgttgaggccaaaaagtgggaccaagatattgtagggcaaatggcacagcctaaggaatattctaaagaggtaccgtttagatcagattatcgtctagtttcaaatgaaatgggtgattacaaagttccattcatctatactgcaaatggtcgtccatatcttaaacaatatcaggaaaaatctggtatttggttctgggatgcacgtaatcataaagaaagcgcatatgctctagaggaatttcataagccagaagatttatcgttgaagctttctgctaaaaataaagaagaagcaaatcaagacttggtagatgatcaagattttcctgattttgcacatcgtgaatatcaaattgctgcaattcaagcgatggaaaatgccatcaaagatggaaaaaagcgtattctgcttgccatggcaacaggtactggtaaaactagaacggcaattgctttgatgtacagactacttaagcataagagagctagacgtattctttacctagttgaccgtaattcattgggaaagcagactgccaatgcaattaaagataataaaataggtacgatgtcaatttcttccatttatggattaaaggaattgagtgataaggcacctgaaatatcaacaaaaattcaaattgcaacggttcaggggatgatcaaacgcctatttttcagtgaagacagtgatgataagccatccgttggtcaatatgatttcattattgttgatgaagcccaccgtggttatgcagaagataaagagctcagcgataaagaatatcaattctatagtcaagaagattatgttagtcaatatagacgtgtagttgattattttgatgcgactgctattggaatgactgctacgccagctttacaaacgattgatatttttggcaaaccggtgtattcgtatagctaccaacaagctgtcctcgatggctggttagtggatcatgatgcaccagtaattattcaaactcaattgtctcaagaagggattcattttaaaaagggtgccgaagttagtctttttgatcaggatgaaaaaactatcaataaagaaaaattacctgataatatgaattttgatgtaaaagactttaataagagagttatcacacgtagctttaatgaagtagtttgtgatgaattagctcaaagatatcttgatccaaatgatccaaatttaggtaaaactttaatctttgcggcaactgatgaacacgctgatatggttgttgacttattgaaaaaagcattcaaaaaagtgagtaatcctgtagatgacgatgctatcgaaaaaattactggttcaattcggcatcctaatcaagaaattaaaaactttaagaatgaaaccaaccccaatattgcagtaactgtagatttactaactacgggaattgatgtaccgcaaattactagtattgtcttcttaagaagagttcagtcaagaatcctctatgagcaaatgttgggacgggcaaccagactttgtcccgaaattaataaatccaaatttacgatttatgatgccgtcggaatctatgaagcaatgaataaagtgacaaacatgaagcctgttgttaaaaatccaggacataatgttcactacttcttaaatcacaaggatgatttctttgagacaaatgaggattccgctcagtatcaagtagatatggctggtgccgttgagagaaaaattaaacgtttggatgatactaaacgtgatgagttccaacatctagctgagattaattcggttgatcaatgggcccgtgaattaagtaagttagataagtcccaatttttaaagcaatggcctaagtttgagcagttagatcacatcaaacctgtcaaacccaagcaaataatatcagacgcagtagacaaagtaattaatgtaagtcgaggttatgggcatggcaatcaaaaaccagcggattatattgaaaacttcaataaattcgttaaggaaaacgtcaatactattccagccttacaagttgtagctactagaccgaaggatttaacttttgatgaactcaaaaatattaaacttaagctagagcaaaatggctttaaagaaaatgatttgcaaagtgcatggaaaaacgttaaccatgttcagaccactgccgatattattagcttcattagacaagctgcggctggatctgagttggtggatcatgatgttagaattcataatgccatgcaaaaagtttatggtttagctgattggactattcctcaaaagaaatggttgaagagaattgagaaccaattaatttcatctactgtattggggccaaatgctgagaaagcctttgatgataactatttctttaaacgtcacgggggttataagcaaattaagaagatctttccagaaaatgctgatcagattatttacgtgttgaatgagaatttatatgtttaaaaatgccattactggtattttttgcttttaatcacgaaaagttgtgataaaaaaaggcgtgtgctaaacttaaattaacacggaggaatacaatatgttaatcgagttcactgttaaaaattatgcttcttttagagagcgcactaccttgtctgcagagacaggcaatagactacgtaaattgaaagaaactaatactttctcaagtaaaaatccatcattattaaaaagcttactgttatttggtccaaacggttcaggtaagtctcaattgattcaagctttacaaacaatggaaggaatagtaacacgtccaactcaagccgtaactgataagttaaattattatccttttttgtttgatgaaaagtccaagattgaagatacttactttgaagtgaagcttgagttaaaaaacaaaatttatgactattcatttagttacaatcgagagagcattaccagtgaagcattaaccttaattagtggtaacaaggaaaaagaaattttttctcgaaatggaaatgacattcaagtctctaacaagcttttggaagacagcattcctaagcttagagataattctttattcctatatttagcacaatctgaaaatgatgcagattgtattgctatctataagtggtttgttaatgatctgatttttattggcagcggctatccagtaaatattcctgacgaacttttaaatttgatggaagatgaatacctcaaaaaagaaatgatctcattcttaagttttgcggattttaatatctctgatattagaattagagaagtacctactaatccgttgaatccacaattacaaaagattgtagagaatttaaatattgattatcctaaaacaactaaagaactatatacggttcacaagatttatcatcaaaatgaagttattaattctggggaacttccattaacacaagagtctgttggtacacgtcgtttattttatatagtattagcaatgatgcttgctcaaatgaatggtaacgagaagacgattgtaatcgatgaatttgatgattcactgcatgttgaacttgcagctgctttagttcgtatttttaattcaacagaaaatttgaatcagtttattatcactactcatgatattcagctattagacagcgatttaagaattgatcaaatttatttattagacaaggattttcacggaattagtgatttgaaatcaatctttgactttgaagatgcacgtaataaaggtcgacatgatatttcgtttgctaagagatacttacaaggccgattcggtgcagttcctgtaatagatgtagatggtttgctagatgtattgcaaatgattcatgaaaaatatggggatgagcatgggaagaataagaaataagactaagtctaatccaattattggaattctgtgtgaaggtgaatctgaaaaacaatattttactatgcttaagcagaaatatcgtttagcaaatattaaagttaaaatagttgctgcagatttgtctggtaaaagtctagtagaaaaagcagttaagtttggcaaatataatcatttagataaaacttatgttgttttcgatagagatgagcattctaaagatgaattaaggaaatgcgctaaacttgctcgaaaaaatgatattactattatgttttcttcaatagactttgaaatttggattttaatgcattttgaaagtgtcactcgttcttatactagaaaagagctagtacagaaactgtctagatctgcctattttaatcaagattatagtcgctttaaaggtaatagttatcgagaatatatttttgataaagtgcaagatgcagtagatcacgccaataagttgtatcggaaaaagagtgactggattaatgatgatccatttactaatattcaaatatatctaccggaaatcttcaaaagagacaatttttaaaggagcaaaattaagtgaacaatcaagaaatcgttcaaaagttatggaatgaatgtaatattttgcgtgatgatggtgtcagttaccaagattacattactgaattaacttatatcttattcttaaaaatgagtaaggaacaaggtgaacaggatgatatcccccaaaaatatcaatgggataatcttgtttcaaaggaaggactagagttaagtaacttttatcgccaattattacttgatttaggtaatcctgaagtggttaatagtccaagaatcaattcaatttacgctgatgcttctacttcaattcacaaacctgctgacctggaaaaaataataaaagatattgacgcacttgattggtggtcagctcgtgacgaaggccttggtgatttgtatgaaggtctaatggagaaaaacgccagcgaagtcaaatctggagcaggtcagtattttaccccacgtgtgttgattaacatgatggttagaatgactcagcctaaaattggagatcgctgtaatgaccctgctgctggtacttttggctttatggtagcagctgacagatatttaaaagatcaaacagatgattattcaaccttgtccgcagataaagaagaatttcaagtaaaagaagctttttctggtatggaattagttgaaaccacgcaccgtttagccatgatgaatgagtatcttcatggcatggatggacgattggaactaggggattcattatcttcaaatggtaaatggatgaaagattttgatgtagttttaactaatccgccatttggtaccaagaagggtagtgacgacagtgtaagtcgtgacgacctaacttataagactagtaataaacaattgaacttcctgcagattatctacaattcacttaaacacaatggtaaagctagagcagccgtagttgtgccagataatgtattgtttgccgatggtgttggcgaagcaattagaaaagacttgctcaacaagtgcaacttgcacactatcttgagattgcctactgggattttctacgctcaaggtgtgcagaccaatgtattattctttactcgcggtgaaagtgacaaggataataccaaggaaacttggatttatgatatgcgtcatcagatgcggtcatttggtaagcgtaatccattaagtgacaaggattttgcggaatttgaaaaactattctgcgttgacgatcgctcaaagagaaaagaaacttgggataaagagaagaattctaacggtagatggcgcaagtttacgattgatgaaattttgaagcgtcctaatactagccttgatatttcttggatgaatgatgaagaagagcacgataaccgttcgttgaaagaaatcttagatgagatgaatgacaagtctaaggcaattagggatgcaattgcggaacttaataaggcgttagaaggaattgacgatgaagactaatactttagattttgatgcacaggctttaagagaaaaaatcttggatttggccatgcacggaaagctggtgccacaagatcctaatgatgaaccagctagtgtattgcttgagaagattaaagctgaaaaagagcagttgattaaggaaaagaaaattaagaaaagtaagccgcttgctccgattactgatgatgagaagccttttgatattcctgatagttgggaatgggttagattgggggatgtaggtttactaaaaaatggaaaaactcccaagaaagaagacataagtagtgataatatttatccatactttaaggttaaagatatgaataataataacttatatatggaaaacgtgaaaaattgggttggagaaaaatatagccgacaagtaatgcctaaaaatacaattatttttcctaaaaacggtggagctatattaaccgcaaaaaaaagaattttgtctcaagattcattggttgatcttaatactgggggattaataccatacaatgacttaaatcacaagttcatattctatctgtttttaagcttggacataaaagactttgtaaaaggatctgctgtaccaacaattaattcaaaaaagttgaaagaaactcttgttccacttccaccacttgaagagcaaagtcgaatcgctgctaaaatagcgcagctattcgctttgcttcgcaaagtcgaatcttctactcaacaatacgcaaaacttcagactttgctgaagtcgaaggtgctggatttggcaatgcgtggaaaattagtcgagcaagatccccatgatgaaccagctagtgttttgctagagaagattaaggctgagaagcggaagatgatcaaggaaaaggagatcaagaagagcaagccgttgcctccgatcactgatgaggaaaagccgtttgatattcctgatagttgggaatgggttagattggggaatattgcaaaaaggattactgatggtacgcataatcccccaccgaattcacatgaaggaaaacaagttatctctgcaataaacattaaaaaaggaaaaatagatttttctttatcaaatagatttgtttctgaagatcaatttttaaaagaggataaaagaacaaacatccgaaagggagatgtattactcactattgtaggctcgttaggtaatgctgcagttgttgatactgataaactttttacagctcaaagaagtgttgcggttattagtagtaatattttaagtaagtttctttattatgttttaatttcagcaatgtttaaaactcaaatttttgctaatgcgaaagggacaacccaaaaaggaatatatttgagtaaattaattaatttgaaattacctcttccaccattagcggagcagaatagaattgttgataaaattgacaatttgtttatatattagaattaacttttaagagatgaatttatataatacgaggagattaagtatgcagttgtacagaaactgtcaaatcttttgtgtaaatagttctttctcgtaaattgattttttaatcatttatttaatcaaaataggattctaaggtatcctgaacctgaccaaagcctttatgaattcggttgaaatagcggtcattgtagctcattgcctggatgccaataaatgcatcaagcgactgttcagttggaaattctgccttaggcttagctttacgcttgatgacgttgttaaaggattcaatcatattggttgaataaattgaagctctgatttgtttgggataattgtagaagaccagcagatcgggctcaatttccttcaaacctttgatgacattgctataagctttattccatctggcatagaatttgtgcaagacagctgcagcttcttttttgcttgtctgttgatgtatctgcttgaattcgttcatgatcttttcgcggtcatccacccggactttagcacagatattgcgcatgacatgaaccaggcagcgttgaaaatgagctttaggataagtcctggccaaggctgttttcatgccaacaacaccatcagaaagaaagagttcaacttgcttcaagcctctggacttcatgttttgaagcatctctgtccagacttcaatgttctcactaggagcaatgcagtagtcaatgacttccttatgtccattaggtttaatgccaatggcaatatatactgcttcacggtcaaacgtttctcggcgcaaaggaaggtatgtcgcatccaaatagacacagaaaaacttgtcgcttagcttgcgcttgtgataagcctcaaccttggggagcatctgcttggaaatatttgatacttgagctggactataatgactgccatacattttctcaatcaagtcagcgatttctctggtagttacgcctttggagtagagcttgataatcgtgctttccaaaacatcagagtgctgcttgtagtcaggcagcgtgtgctgatgaaactgaccgttgcggtctcgaggcacttgcacttcaattggtccaaactgggtatcaaccttgcggaaataagcaccatttctagaattgccagtattccagccatttctggcatagggatcatagcctagaaaggcagttaactcagcttctagcaagttattaacagcctgttgtagctctttgcgcaataaatcatttattttgtctggattgaatagagcttgagcaaaatctttggtaaaatcattcatgaaggagttcttctttctgtatgtgtttttttgttcaaaccaatcatacgagaaaggaactcctttttctaatgtttaaagaaataaatttaaggaatcattcatccttacacaaactattttacagtctcgttgtacagagataaagaaatagatatagagttatcgttacctgataaatataataaacaagataaaaagaaagcactaagtaaattttatagagataaaataaatccagatgatgataatgatcatgattttgtgtttttagaaaagcaacttcataagtttctcaaaagggctgttttgcgttttataagtaaagattatagtaatgttgtgctattagttggtgccggagcttcagttgtaactaatgagaatggaaatattaattcaaattatggaaagactatgcaagatatttcatggaatattttcaatcagctttatggaacaaataatttagaagaatatttagatgaaaaggatgctaagatctttttacctaaagatcaacaagaaaaatttgaaaaagttaattttgatgatgaaagtacatggttttcttttccattagaagaatatatttcaaatttaaatttatatattcaagacgcagagatgtctggtaaaaaagtcagaaatccaagtttatcacaagcaaaaaaattaaaaagatttattttactatcaatacttgattcagttgattataatttcgatagtacatctaaaatgccatttaagcatgataaagtgattttaaagttgcttaatttaattcattcggatagcagtaaattgatggttgcgactacaaattatgatttagcaattgaaaaatctctggaaaaagataacttcacaatatttgatggatttgaatttggaaataataaagaattcaatgatgatatgtatgagtgggttttgagtaaagaagttaacaatattaatactaaacaagttatctataaaaagcatgttatagatcttcttaaaattcatgggtctattaattggattgaaaaagaaaataaagttactaaatcgactgtggaagaggtaaaaagtacgattagagataacagtaatcatgtaaaaatgatttttccaagttctaataaatatgctcagagctatgaggaaccctattttgatctcatgtctcgatttcaaaataagttgcaccaacctaatacattattagttacttcgggttttagttttggtgataatcacataagtagaatgattataaacgcaattaagcataactcaagtttagattgtttgattactgattataatattcataattttgataaaaaaacagaacaagaagatgttaatgacaactggagtgatttagatgatttgagagatcgaggatataatattgcttttcttaaagcaacaatgtgtagttataattatgatttatcttattatgtgggataactatgagtttgatagataacttttttgatagttcagacaaaaatttgcatgtagacaaatgtgaatactatttaggtaaaatatctactgtatcttctatttttgctaatattcaaatagaaaacatgagtttattgaagtatcgcttcaatcaaagtgatgttttacgccctaatactattaattatcatgttttgattgatagtaatggcacaattttcgaaactgtcaaatcttttgtgtaaatagttctttctcgtaaattgattttttaattatttatttaatcaaagtaggattctaaggtgtcctgaacctgaccaaagcctttatgaattcgattgaaataacggtcattgtagctcattgcctgaatgccaataaaagcatcaagcgactgttcagttggaaactctgccttaggcttagctttgcgcttgatcacattgttaaatgattcaatcatgttagtcgaataaattgaagctctgatctgcttgggatagttataaaagaccagcagatctggttctatgtctttcaagcttctgataacatggctgtaaaccttgccccatttggtatagaagtcatgcaggacagctgtggcttcttctttgtttgtctgttgatgcacctgtttgaattcgttcatgatcttttcacgatcgtcgacgcgtactttagcgcagatattgcgcatgacatgaaccaaacagcgttgaaaatgagctttaggataagtcctggccaaggctgttttcatgccaacaacaccatcagaaagaaaaagctcaacttgctttaagcctcgggatttcatgttttgaagcatctctgtccagacttcaatgttctcgctaggcgcaatgcagtagtcaatgacctccttgtgcccattaggcttgatgccaatggcaatatagactgcttcacgctcaaatgttctcggcgcaaaggaaggtatgtcgacatccaaatagacgcagaaaaacttgtcgcttagcttgcgtttgtggtaagcctcaacctttggaatcatctgcttggaaatatttgatacctgagctggactgtaatggctgccatacatcttttcaattagatcggctatttccctggtggtcacgcccttggagtaaagcttgataatcatgctttccaagatatccgagtgctgcttgtagccaggcagcgtgtgctgatgaaattgaccgttgcgatcccgaggcacttgcacttcaattgggccaaattgcgtatcaactttgcggaaataagcaccatttctagagttgccagtattccagccatttctggcatagggatcatagcccagaaaggcagtcaattcagcttctaacaagttattaacagcctgttgtagctctttgcgcaataaatcatttattttgtctggattgaatagagcttgagcaaaatctttggtaaaatcattcatgaaggagttcttctttctgtatgtgtttttttgttcaaaccaatcatacgagaaaggaactcctttttctaatgtttaaagaaataaatttaaggaatcattcatccttacacaaactattttacagtctccaattttcttagggaaagtaataagttctaggattaataatactgataatattcataaggcagtaatagaaaataatgatgatattatttacccaaatattgaaattaaactaatggcaatgtacgataaaaatacgtttgtattgcccggagatctaacagtaggaattggtgataaggcatatatctgtaatgatgaagctattaagaaatatataaattcattagaaattaataaaagggataatcaaattgaattttcaagctttaatttaaatgaaaagaaagctattccattcaaaattagtgttgatggattatttaatcaccattttatgattgtaggagcaacgaattctggtaaatcaactagtgcattagcgattttagataaatatcaaaagctaaaaggaaaatttttgattatagatccaactggtgaatataaagatgcattttcaaaaaatgaggttaatttaaaaacaatagggaaaaatttattcttgaatactgctaatttgactgatgaacaatggatttctttatttaggccaaatgataattcccaagtgattgagcttttagaggcaataaaaaaattaaaatttgttcaatactataaaaagcatttaaataaggtaaatttaaccgaggcagagaatagatttataagaaatgatattcttgactgtgaaggggcaaatcaagaacagtacaagcatcttcagattcagtgggaatctgataaagtttttaatgaatcatttgatataaacaatttagataaacaaattgagaaagattctttaaaacttagttggaataaaggtataaaacaaggaacctaccagtttgattattttacatatggagctaattcttggctaatacgtaaagtaaaatatttgattaagacgtataatctaaaagagttatttttaaacgtagatagtaaaactcaagataaggattttggagaaacagataaaggtaaaaagatactcaaagaccttaataaagaaatgttagaatttcaaggtaatgacatatcattatatatacgtttaaatgattccaaattttcaattggattaggacaagtaattgtagactatataagtaatttcttattaaatcatgatatgacaaaacatccaactttattatttgttgatgaagttcacagatatgctttagaaaaagatgctcaagatgattttatttctcctctggctacgttagcacgagaaggaagaaaaaatggaatatttctatttttaactactcaaagccccaaagatgtgccaactatagtattaaatcagataggaacacttttaatgcatcggttaactggtgaatatgaaattaaagcaatcaataatttcctaaataaagacaaattagctcagttgtcgagtttaaagtcaggagaggcaatattgactagcgtaaatttgatgcaaccagtcaatcttaatataaaagcttctgggcgaacacattacagtaatacgcctaagttgataaagataaaaaatgattgactacaaaactttaaaacatagtgaaaatgggatgccaacttgggatgcatttttaggtcccatgctagaggtagcgagtactaaagaagaatgggtaggtagagagcttgataagctgttgtcacagagattaatttacctgaagaacttgttaatttaagatatccttctaaatatcatgatttagtagcaattagtcgagtagcttgggcgcttagtgatttaaaattagctggtttactaatctcaccaagaagaagtatttataaaattagtgatactgaaaaactgctattaaataaatatggtctaaacatcactcgtgaattagtacattctcaaccagcatatattgagcaccagaagaagtttcaagagaaaagcactactgatgaagaagtcttagaagagcagacttttgaattagccgaagaaaagaagaagaaggatgagtacgataagctaagctccgaacttaaagatgctaaggataaaaaagaagaacaagagaaggagcaaaaagaacaggcaaaagcagctgctaaaaaagctactcaaatagcaaaacaatcacggcaaaacgagtcagctcaatctagtcgttcaactgcaacacatcattctaatggtggcggcaatcatggagacctagatacagcagaaactggcaaaattgtcggtaacgtcaattctaagatttatcacgtaccaggacaagcaggctatcatatgaattccgcaaatgcggtttacttcaatagtgagcaggatgcaatcaatgctggttacagaaaggcaaaaaggtgatgaataagaagaaaattattacacttgtttcaagtacgttgtttttgtttggcggctatggtgcgattactaatcctagtctaagtcaaaatgtcatcgccaaggttaaaactatcatcaaatatgaccacagtgctgagaaaaagaccaagcaaattgcgcaggaaaacaagcaaactgaaaagaaaattgttagcctagacaaaaagattgctaaactgcgcaaagaactcaagaagtacactggcaaacacaatattgaatctgttagtgccgcaaaactggcaagtcttaactattctgggaaaaacatcattacagtaaataacaacgatcctagtttttctaagagtgacttgagtactaatcgcggagcatggcaagaatatggtaacctcgatggtttgaatcgggtaactgccgcaaacgcattgcttattcagtcgctgatgccaagcgctagacgcgaaccactacatgttgatcctactggttggcataataaacgagttgctggcggctggctctataatcgctgccatttgattggttatcagctaacaggacagaacaacaacattaaaaatttgatgacaggtacaaggcagctaaatgatcctgatatgttgcgctatgaggatcaggttgctgattatgtaaaagaaagtcgaagcaactacgtccgctaccgtgtgacaccggtctttcgtggcaatgaactattggctcgcggagttgaaatggaagggcagtcggttaactcaaatgcagttcatttcaatatttacattttcaacgtgcaagatggcgtaactttgaattatgctaatggtactagtcgagtagggtagtagaaatgagatacccttattgataagaagatgactgagattaatttctcggtcattttttattaatgatatttccttagaaacaataatattgattctattaaacaacgtttttcaattcgtaaaataacaatcggtgcagtttctgtactaattggattgacttttatgagttactctagtcaaacagtacatgctgatagtgttgatgcaaattcatctgatagtgctactaccagtgttataaaggaccaaactactacagagcaagttgcttccacaactaaaacttctaataatgtagatacaaatggtgccaataaaactgaagacactactagtattgtgaagacaaaatcgactaacaaagttgatctttcaaatactgatttaactactaagaacaattcaatcgatgataactcaaatgtcggatcatcaattgaaagtaagaacaagatagctactaatgaaaacaagcaggagagtacgacttctaccaataagcaagctactacagtagcttcaactagtaagacacaagctaacaccactcaaaatagtcagtacaacactgcagattgggatggaagtttagatcaaaattctcatcaatacactttaactaaatataagggtactggtaataaaaatatttacatccctaatacccaagattttatcaatgcaggaacaataactactgatgataaagtctatatcactaaagacttattagaaactatcaaagatgcaggtgcagttaacattactattgacagtgagggagataagaacaaagtttatgctaagggtgacatgaccgcagccttaatgaacagtgacactttaaagtctgctgatctaagtcatttagatgttagtgaagccactgcaattagatctatgtttcaaaatgacaagaatcttgaaaatgtaaacatcgctggctggaatatgggtcaattcagtgacgtgtcacaaatgtttagtggcgctgaaaagcttgtgaaagttgatctaagcgatactgtatacaaaaatgtggtaaacgcttggaacttttttgcacataataatgccttaactgatgttgatctaacaaatgcccgcaacattactagagaaatagttaatggatacgttcaagcaataaagaaccaaatgcaactgccattgatttaactactacaactttgaattccaatgtaactaatctgaaacttttattttctagtattccaaatgtaaaaagtattaacttaagtggttgggatacaagtcgtgttactaatatttatgcaacatttggtcatgataaaagtcttgaatctgtaaatattagtggttggaatttatctaatgctaaatcgattgctagtttgttcgatggcgatagtaatttatccaatattgacctaagcaatgtaaactttggtaataatattggtgataatggtgattccttcggccatgttggtaataaattaagtaacgtaaatttgactaatgctaaaggaattcccgaagcagtattgagagcatggggtcaagcagcgaaaaataccaaggctactgagctttcaatgagtacatttactgtttcaaccgacagttgatttagactttaatcttcacggtcaaaaacctggcatcgattcaagcaatataaaggttagagacgaaatagcagtagtaaagtaaataaatgtgatagaggattggacttatatttaattgctgtaagttcaaccctcttattttgattaaatctttgatacaatagacatgattaaataaatagggtgtgatctaaattctaaaatctaaacggcatttcatgtttctaggagttgcaggaattatctattattcttggctcttaatcgttctatttatcgcctttattttgggctatgaagggaacaaagcaattagtatacctggaatagtagttggtatcattttcttacttttagcagtttatacttggtccttttcttacttgcaaaagggtggagacaaaatattactcaagttgccatatcgttcaaaagtaaaaatcaatcaaatgactttgctttcaagttggcgtaattttcaagtttatcaactaaaaagtgattaccaaagctattctgttttaatgatgtctagaaagaagaataagcaataatgaaatcagatattgaaatcgcacaagaaaccaaagaattacctattaatgaaatagccgctaaggtaggcttgaaagaggaagacttagaaccttatggtcatgataaggctaagattacttggcaagccattaacaggactcgtgctagtaaaaagttaggtaaattagtattagtaacgtcaatttctcctactcccgctggggaaggtaagtcaacgattacaattggcttgggggatgcaattcacaatcagttgcaccagaatacgatgatcgccttgcgtgaaccttcgatgggacctgtttttggattaaaaggcggtgctacaggtggtgggaaagcacaaatcatccctatggaagatatcaacctacacttcacaggagatatgcatgctttaactgccgcaattgacacacttgcagctttagttgataactacatctaccaagacaatagcctaaatcttgatcctgaccgaattttacttaagcgtgggcttgatgttaatgaccgtgctttaagaaaaatcacggttggtcaaggctccaagtttaatggtgttgaacatcaagctagttttgccattactgtagccaacgaattgatggcgattctctgcttggcaactgatattaacgatttaaagagtagaatcggtgacatgctagttggttacactaaggatgatgaaccggtttatgttaaacagttaggattccaaggtgcaattgctgcactattgtctaatgcgctgaagcctaacttagtacagaccttggaacacacaccagcattagtgcacggggggccttttgctaatatcgcgcatggagccaattccgtcattgcgacaaacttggctttgcatttaagcgactatgtattaactgaggccggctttggtagtgatcttggtgggcaaaagttcatggactttgtctcaagacatctggacaagacgcccgatgctgcagtagttgtagcaactgttcgtgcattgaagtatcaagctttaggctcaactgatcacttagatgaagaaaacctagatgctttaaaagaaggttttaaaaacctcgagcgtcatatgaacaacatgcgttcatacaatgtgccggtcatcgtgttaatcaatcgttttgcttcagatactgaccaagaacttgctttgcttaaacaattaattgaagaacaaggtattaatgctgaagtagttacttatcatggcgaaggttctaagggtggtgtagaagccgctcaagctgttgttgatttggctaactctggcaaggcagatttaactccaacttatgcagatgatgacgatgttaaagacaagattgagaaagtcgctaccaagatttatcatgcagctggagttgaatatagtgacaaggctgaaaagcaaattgcggaattaagaaagttaggtaaggcccaattaccagtaattattgccaagacccaatattcatttagcgacaacaagaacgaattgggtgctccaactgactttaagcttcatgtgaaagggattagtttaaaaaatggtgcgcattttatcgtggttaccacaggtcatgtgctagatatgccaggtttgcctaagcatcctgcggccctagatatcgatgttgataacaatggtaaaattagcggattattctaaaaagatatgcagtttttatatttaattatttcattagttgtggttcttgccgatcaaggacttaagaattatattgttgcccattatgctgtgggagaagtacaccagattattcctgggcttctttcctttaattatttgcaaaataatggtgcggcctggaacattttaactggtcaaatgtggcttttttacattatcagtattattgccattagtgtttgcttgtattttctttttaacaaaaagtacaagaataccttgtttgatgtgggtttagccctcatcttaggtggaattgttggtaattttattgatcgtttgcatttaaaatatgtagttgatatgcttcagcttgattttgttcacttcaacatttttaatattgcggattccgcaattactgttggagtaatccttgtgttcatttacttaatttttattgaaggtaaggaagaacaacatgactaaagaatattcacttgaagtaaaaaacgaaaagggacgtttagataagtttgttgcagaacaaattcctgatctatctcgaactagagttaaagaactggttaaagaccaaaatatcctagttaatggcaaagtcgaaaaagtatcttataagattcaggcgggagataaaatcgaagttaatattccagcggttaaaccgttagatgttatacccgaaaatattccacttgatatcgtgtatgaagacgatgatgtcattgtagttaacaagcctcaaggtatggtagtgcatcccgcaccaggtcatccagatcatactttagtaaatgcgttgttatatcacaccaaggccttagcacaatcaccagaaggatttcgtcctggaattgtccaccggattgataaagatacatctggtttattaatgatcgctaagaccgccaaggctcgtgaatcattagaagatcaattggctcataagactaacaaacgtctttattgggcaattgttcatggtaattttgcggaagaaaatggggtaattgatgcaccaattggtcgcaatccatatgaccgcaagaaaatggcggtagttgaaacaggcaaaaaagctattactcacttcaaggtgcttgagcagttcaaggattatagcttaattgagtgtcagcttgaaactggaagaacccatcaaattagagttcatcttgactatattggacatccggttgcaggagacccattatacggtccacgtaaaaccttgaaaggtcatggtcaatttttgcatgctaaagtattaggatttaaacatccaagtactggcgaatggctagagtttagtgtagaaccaccacaaatttttcaagaaacgttggctcaactagaacaaacaagtaagtgataatatgaaacggtatttgattttagaagatggcagttcatttccaggtgaaggaattggtgccagtattatttcaaccggtgaattagcaattcaaacggctaattttggctaccaagaagcattaacagatcctactaatgctggtaaaattttagtctttacttcaccaatgattggtaataacggtattaatgccattgattatgaaagtattgatcccgtagttaaagggattattgctaacgatattgcattaaatatttcagatagtgaaaattttgaagatttaagttcttttttgaaagaaaagaacatccctgcaattttcaaagttgacactcgtgctttagttcatcgcttaatggaagaaggtacaattaaggcttcgatcatggatactaatgacgagcatgcctttgatcagattaaagcactagttttacctaaaaataaatctgcgactgtttcaactaagaatgcatatgcatcccctaatgttggacgaactgtagctgtgctagatcttgggctaaagcactcaatgctgcgtgctttatctttacgaaaagtaaatacgacagttttaccatacagtgccagtccgattgatattgaaaacttacgtcctgaaggaatgattatttcaaatgggccaggaaaaccagaagaagtaattaatcagctaacgccagttttagatcatttttatggtaagtatccaattttaggaatcggattaggttttttaactttgagcgattatctcggctttgaactggttcaattaccacaagaatttgatggtattaattatccagtgattgaacaaaatagtaatgctatctggcaaacagcgatgaatattgaccaactagtgttgcctgatagtgtgaagatgaatatgaatcgtgaatactttgatctacacagtgaactgatggcgggcttctggaacagtaaggacaaattgatcgccactgcttttaatcctgaaggagcaccaggcactaatgatgcagatgaaatttttgattattttttacagatgatggggtagttatatgccattagaaaacgatttagataaagttttaattatcggatcaggccctactttaatcggtagtgtagcagaaatggatcttatggcaacagaagcaattgatgctttgacagaagaaggcattcaagttgtgctagtcaatcctaatccagctacaatttcaactgataaaaaacttggtgtaacagtctatcttgaaccgatgactctcgacttcctgaaaagaattctacggatggaagagccagatgcaattatgacagcttatggttcaactaatggtttaaaggttgcacataagttattacaagatggcgttttagaacaaatgggaattcagttactaacattgaattcgcgtgctctacaaatggggaatcaacagaaaaagacagagttgcttactaagctacatattgataccgggcaatcttgggaacttaatcagagtattcaggataatttagataatgcgctagaaagcattaacgacaaagtcacttttcccgtattagttactaagtacaaccgttttgtacacaacgaacatttgcaatttgcaaatcctaccgatttaatcagttactttaaagaagaaaagcaaaatgataattttacatggaagaattatcgcttaactgaagacttatctagttgggaagaagtaattgttgacgtaatccgtgataaggatggcaatttagcttttatcaattttgcgggatctattgaagctgtaggtattaattcaggtgactctgcagttgtgatgccatcattaaccctaaacaatgatcatattcaagagttaagaataaccgttagaaaaatcatgtctaatcttgatctcattggatttgctagttttcattttgcgattaaacaccatggaactcaaattcgatctaagcttttgacgattcgtccgcgtttgacgcgaagttctgtttgggctcaaagaattggaatgtatgatgtgggatatgtcgttagcaaagttgctatcggttatcgactgaatgagattaccgatcctctatctggacttaatgcctcaattgaacccaccttagatgcagtagcaattaaaatgccatattggtcatttgctgaatccggctataaccactatttgctaggaagtcgcatgcaagcaagtggagaagcaatgggtgtaggccgtaattttgaaactgcttttctgaaaggcttagatgcaactattaatttagaattgggttggcatgcttttataaaagaaaaagaaaaatccactgcagatattttgaatgatttggcacatcctgatgaattgcatttagttaaattattagccgcaattgatcaagatattccatattctgaattacaaaaagtaacacatttgcatccggtttattatcagaaattgcttcacattgtaagacttggcaaaaagttattacaagagaaggagcagccttcgcgtgatttgctgcaagaagctaaagtctatggattctttaacccattattagctaagattttacaaaaatcagttactgaagttcgctctttgattaataaaattgacttgcagccatcatatttgaagatcgacggctcagcaggtatatataaacctaatgtttgtgcttactacagtgcatatgatgttcaaaatgaagcacaagctttaaatgctgaaaaaaagatcttgattttgggcatgttgccgcttcaagtttcggttactagcgagtttgactatatgattgctcacgcggccgatactttacataagtatggctatgttactgtgcttctatcaaataatgacgaatcgatttcatcaaggtataagaatattgaccgagtttattttgattccattacagttgaaaatattctaactgttgctaaaagagaaaatatttctgatgtattagttcaattttctggcaaaagaatcagtgcattgagtaaagagttggaaaaatgtggtttgcacgttattgggcaaaaggcaaacgacgatccgcgggataagattactactttgcttgatcaacaatctactaccttaaagcgggtcccggcattaaataaaacaactgatacagaccaggttttcgcttttgcttctaaatatggttttccacttttaattggtggtatgaataaagaaaacaagcaaaaatctgcagttgtttatgatgttcctgcaatagagaaatatttagcagaaaatcatcttgatcaaataactatttctcgctttattgagggacacaaatatgaggtaacggctatctctgatggtaccaatgtaactttgcccggtataattgaacatctagagcaaacaggttcgcatgcctctgattcaattgcagtgattcagccgcaaaatttaaccgaagagcagcaaaaaaagattgagcaagagtcaattaaattaattaagcagctgaaaacaaaaggtatttttaatctgcactatttattcgttgataatgacctatatctattgcaaattaaaccatatgcaggtcataatgtagcatttttatcaaaatcactagataaggatatcactacttgtgctacagaagctttaattggcaaaaatttagcagagctaggatatcctaatggtctatggcaaaacagcgattttattcatattaaaatgccagtattttcatttcttaattattcaagtggtaatactttcgattcaaatatgaaatcctcaggttctgtaatgggtcgagatactcaactagctaaggctttatacaaaggatatgaagcaagtgatttacatattccaagttatggaacaatctttatttcagtcagagatgaagacaagaatcgcgtgacccaactagctcgccgatttgatcgcttgggtttcaaattaattgcgaccgaaggaacagctaatatgtttgcggaagctgggattactactggagtagtggagaaggttcataaagaccctagaaatctactagataaaattcgtcaacataagatcgtcatggttgttaatattactaatttgtctgatgcagctagcgaagatgcatcgcgcatcagagatgaagcgctgaatacacatattcctgttttctcaagtatcgaaacagcggaattgattttagacgttctagaatcattggctttaactactcaacctatttaataagcaaaacaaaatgcaaagtcgatatgactttgcatttatgagaatcattgaactaactagttcgatgatttttatttttcaatttttttattcataatttccttttcttcaggagttacttcaattgaattttgtccagtgtagattacaaatcctggtttagcaccattaggctttttcacacgcttgtcttgcacataatcaacttgtacgtgagcggaatttttagccttagaaaagtaagctgcaatctcagccgcttctttaatatcttgatcagtaggctgatcatcgcgtaagatcacatgtgagcctggcatattcttaacatgaaaccagtaatcagatttattagcttttttaagagtaagccaatcgttttgatagttgtttttaccaaccaatacgtgtttaccagatgaaagtttaaattcatttaaattgcgttcaatgattttcttcctacgcttatttttcttttgtttacgtaaatatccttgattaatcaattcatctgtaatttgatcaatatcctgtggatccgcattgtcaatagctgtttgaattgaatccaagtaacgaatatcatccttagcaatacgaagctgttcattaatgtgcttaatagaatcacgtaactttttgtaacgagtaaaatacttttgcgcattacgagcaggggagagagcaggatctaatttaatctctaatggagcattattttcgtaatagttaggtaatgaaactttagtcattccaggttttacttgagccaaatttgcatttaaaatttcgcctttaattctatagccctctgaattttcagcaagatctaattgcttctcaagttttttaactttcttagttagtttattttgctcattcttaactacacgttcaacttgtcctgcacgctgcttaacccaatcacgtgttgcctgatattcataaaattcatctaagccagcattcagatctggattagagctttctttctctaaatctaaatgatagggcaaataacaaaaaatcttacgcttatttctaggtgtttttaaaataaaagcacgcggattgtcaaactgattaaaaaaggtcttaaaagatgaataagtgtaatcgtcttcaagatagcctaataattcagttcgatcatctttatctaagccatccattttttgagcaatttcattaggctggttttcactacttaattgtttaaattcactttctgatagagtcaacccatttaatcctggttttagtgggggcaactcatattttgcttttggcagtaaaacacgcgctctattttcatcaggattaattcgcttaagtaaatcaataatgtgattgtcttcttgattataaaggatgacattactatgacgtcccattaattctacagaaagcatgagcttgacttgatcaccaagttcatttcgattactaaaatgaaagttgacaattcgacctaagccaacttgctcaatcgattgcaaaactgaaccttctaagtattttcttaaaaccatgacaaaaataggtgctttatcaggatttgcaatgttttgtttagtcaaatacattcttggatattgtgcattggccgaaattaaaaattgataattctttctatcttttctaaaaattaagactagatcttgatcaaatggttgataaatttttgataagcgaccacctaccagagtagggactaagtcttttaataaactatggataaataatccatcaaatgccataaatatcacctcaaagttcgtgtaatattatatcaatttttagtcagattctaaaatgattatatttataagttatagctaatcataattgaaacctgcaatacagtagtaaatgtttcacgcgaggtctgctatatcattaagttgtatattacaacataaaaagtgcattgtattatacaatattactgataaattagccttttggtattatcaaatgccatattaaatgataaaatacaagtatatagtaatctacattggagaaaaaggactatacgaatggatgtattattttttagtacgatcgcagatcaagtgaaaaaagaaataaatcacaaatgcggcttaaatatttcacaaactcgaattttgctattttttgatgaaaacaaaaatcaagcattagcgatggggaagctggcagaagcgcttaatatttcattatcaaccttaagtcgtcaattgcagcaaaagaagactatgagctttattaatatcactagatcggaaaaagattcaagcaagattgtgaatctaagtgaagctggcgtgactaaagctaaagaactaaaaaaaactctgactaagattgagaatttattatttgtctattttgacagagatgctgctaatttatttattaagcaattaaatcaagtcgctgatacttctatgaccctagaaaaaatggaatagggtgcgtgataggtgccttttatgctataatttttctatgctaaattagatatgggaagggttaataaattgaaaattgcattagttactgacagtactagtgtcttaactgatcaagaagttaaaaataatgatattaatgtagttcctattcctgtcatcgtaggtgataaggaatattcagaaggcgttaatatcacttccacccagctttttgagatggagagacaaggtgctgcttttcctaaaacttcacagcccagcatggggcaaatgatagaattatgtaataaattacacggagaaggctatgaagctattatcgctatcactttgtccagtggtatctcaggcttttatcaaaatatggtaaatatggcacataacaatcctgaatataatttatatccatacgattctaagatgacagttagattgcaaggctacttggtgttagctgccgcaagaatgataaaaaatggtatggaaccagaggctatcttaaagaagttagatgagatacgtaagacaattgatgaattctttgtagtagatgatcttaaaaacttaagtcgtggtggtcgtttaagcaatgccggtgcttttattgggacaatgcttcaaatcaagcctttgttaacttttaatgatgaaggaaaaatcgttgcttttgataagatcagatcattaaagcgtgctgtttctaaggtagaaaaattaactttagagaagacagcaaatttgccttataaagataagctacgcttgtttgtatttcactcaaatgatttaaagcaagcggagcaaattaagcaatttgttaatgaaaactttccagataagccagttgatgtagctgaatttagtccagtaatcgctacacacttaggagagaaatcaattgcaattgcatggatggttgatattgataagctcgaattaaaataagaacaaatagccatagaccatagtacaaactatggtcttttttgtttaccctttttacgataatagatttgtaattaaaaattacagttgagatactagtgctgaatgttatagtaaaattgcgagactgtaaaatagtttgtgtaaggatgaatgattccttaaatttatttctttaaacattagaaaaaggagttcctttctcgtatgattggtttgaacaaaaaaaacacatacagaaagaagaactccttcatgaatgattttaccaaagattttgctcaagctctattcaatccagacaaaataaatgatttattgcgcaaagagctacaacaggctgttaataacttgttagaagctgaattgactgcctttctgggctatgatccctatgccagaaatggctgaaatactggcaactctagaaatggtgcttatttccgcaaagttgatacgcaatttggcccaattgaagtgcaagtgcctcgggatcgcaacggtcaatttcatcagcacacgctgcctggctacaagcagcactcggatatcttggaaagcatgattatcaagctttactccaagggcgtgaccaccagggaaatagccgatctaattgaaaagatgtatggcagccattacagtccagctcaggtatcaaatatttccaagcagatgattccaaaggttgaggcttaccacaaacgcaagctaagcgacaagtttttctgcgtctatttggatgcgacataccttcctttgcgccgagaaacatttgagcgtgaagcagtctatattgccattggcatcaagcctaatgggcacaaggaggtcattgactactgcattgcgcctagcgagaacattgaagtctggacagagatgcttcaaaacatgaaatcccgaggcttaaagcaagttgagctttttctttctgatggtgttgttggcatgaaaacagccttggccaggacttatcctaaagctcattttcaacgctgtttggttcatgtcatgcgcaatatctgcgctaaagtacgcgtcgacgatcgtgaaaagatcatgaacgaattcaaacaggtgcatcaacagacaaacaaagaagaagccacagctgtcctgcatgacttctataccaaatggggcaaggtttacagccatgttatcagaagcttgaaagacatagaaccagatctgctggtcttttataactatcccaagcagatcagagcttcaatttattcgactaacatgattgaatcatttaacaatgtgatcaagcgcaaagctaagcctaaggcagagtttccaactgaacagtcgcttgatgcttttattggcattcaggcaatgagctacaatgaccgttatttcaatcgaattcataaaggctttggtcaggttcaggacaccttagaatcctactttgattaaataaataattaaaaaatcaatttacgagaaagaactatttacacaaaagatttgacagtttcaaaattgctatagtaggcaatagtaatatggttatcataaaatataggaattaatttaataactgttttactatagtatatattttaatgttctttttatgttacaatcatttttaaatcaaattatagaaattcgaggaaatgcatatgtctgcaagcatacttattaagccattagttacaatcagcgttaaattaaacataaggaaattacatcaaattgaaaaatatcaacaataatcaaaacttaaactttactcaagttaaagatatcttagctcaacaggcaattactattgctgccaaagaacaattaagttccgtccaaccaagtagcaatttacataaagtagaacaactgcttaatgaaacagaagaagccgtgaagattttgaaattacggcagcacattccttttgccagttctgaggatatcgagcatttaattactaaagctgaaaaaggactaatcttaactcctgatgatctagaaaaagtagcagaatttttacgagtaaatcgcctactacaacgctttttagccagacatgagcagctagcaccattactcaatgcatatgtccaagacatgacgctattgccagacattgaagatgctatttatactactattgaacatggtcaagtacgcgatgaggcagatcgtgaactagcaaaaatgtgccgcgacttaaagaaatctgttactgaactcaaaactgcattaaatcattttttgactagtaaacctaatcaaaaaatgattagagacgcaatgatcgttgaaaaagagggctacgctaccattccaattaaagcaaactacaaaaatcaattgtcagggactattgtggctgtttctaatggtggacaaaccgtctactttcaacctgctaaggttgttcgtctaaatcagcaaataaccaatttaaaggcacaaatacgtaatctagaactagcaatcttaggtgctttaactgcaaaaatatacgacgtgaaggatgatattaagcgtaacattgaactaatcactttactagatatgatttttgctaggggaaagtttgcacaaaaatataattgtattaggcctaaaattaatcgtgaaaattctcttgttttacgtgcagtgcggcatcccttgatcattaatcctgttccgttaaccttagaattaacccaagaaaatagtgttctaatgattacaggaccaaatgctggtggtaaaaccgtcgcgcttaaaactactggcttgatgattttaatgaccgaactaggtctgtttttaccaagcgataaaccatgtgatattccattaatggatgacgtttttactttaataggtgatcaccaggacctagataattctctgagtactttttcagccgaaatgaaagatattgccatgattaccaaatatgctcaattccatagtttagtattattagatgaattagggacagggacagatccaaatgaaggaagcgcactcgctattggtattctacaagagttgtatttacgtggctgtttaatcatggccacaacacactacagctctattaaggattttgctaagcagcatgatggttttatcacagctgcaatggattttgacttaaaaaatctgcaacctacttataagttaaagataggaagtattggtaatagtcgagcactatggatcgccaaaaaatcaggtattccagaaaatgttttgcatcaagcagaagccatattagcgggcaataatttacctttatctttaaaaaaacgtttcgttcaccagcggaaaaacaaaagcaacctggttgttaaaaaagaatttcataaaggtgatattgtatatgctaccaatttaaaagaagaaggaatcttttataaatatcttcctacccaaaatgcagcaaagatatttgtgacaaaagaatttgtagaagtaccactcagacgtttacaattaagacgactagctaaagacttgtacccaaaaggatataacttagatttactctttgttaaagactggcaagattataagtttaatcgtgatctagatcgtggctccaaaaaagcttacaagaaattgaaacattaataaaaaacgagtttggaattgaatagccaaactcgtttttgcatttaatttgattaatcgtgatttttttttgagatctcattgagagccgcacgctgttttttctgatcaacatgagtatatagatcggtggctgaagtgcctttttgacctagctgttgtgctacaagcacttgatctttagttacttcatagagctcagaagcaaccgtatgacgtaacttatgtggggtaaggggatgaccaaaagctgcagaatacttattgatcattttttcaattgcattagttgtaattcgccgcgtttgaccatgccattgagttaaaaagaatgccacttgcttactatctgcatgatagcgttcattacgaatacctttatatcgcttgatataaggaagtgtccattctgcaattggtacactatctttttgtccgccttttctagttacatctagtacagcatccttaaggtttaaatcactcaaatcaacgccagcacattcagacacccgaatgccggtacctaagattaatgcagcaattgccatgtcacgttctttgttttgcttaaaaccaatctttgcttgcttattacaatggttaatatagtcctgatcaataaaagtcaaaaattcaaattttaacttaccagtgtacatgtggctttcaagtacatgagcccgataattaagtgtttgcgtatcatttaaagaattaattttaagcattacattccgttcaaaatatggctcaccatgattattgtcggcagtaatggttaaaaacttaaatagggagcgtaaagcattaattgagcgattaatcgtagtgggggagtttagtcggccttgcttattacgggtatgtcctaaataatcaatatacagcattatgtcattgcgacgtaagttggctaatgtatccgtagtaacatgagcattatctgaagcagaagagatattttcttgacgtagccaatcgaagaagcgtcgaatttcagttaagtactggtaagtagtagttaatgaatgattagtaccaagattaaattgcttaacaaaatcaggcaatttatttacttcaatttggatcaattctaggtatttagcagtttccatatctactccttttgcgaactaatgtttatattatatcatacaaatacgttaatcataaaaaaatcacctattctcaggaataggtgataaaaaacagtctaatttaaaattactgcgctcattcgaacgtgaatatctatagtactaacgtagaaaaatgattgcaactaaatttaacttagataatcatgtcactataactagaataccagcaacgcttatagaaaactcttagcattctaattatagcaacagtgattgctcgtcagtaagtaagggcaaattacatttagtaattcaaacattacttacaaacatatgttgtttgtatggtacaacacttttcaatcgtttattttatgctctttattgctaatgttcaagtaaaatataacattttttataaagaatcgaaaaaagcttattttccttgtttagtcgtattttttggctaaaaattgtacaatagatgaaaatacattatgtgagatgaggaaaaagtatgacagaagaaattagtgtaaacttccaagctaaaaaccctagtggtatcaaattactgaatcgtctatatgatggtcacttagtgttaaacgacattggcgttcgtttagatgaacaacttaataatgaagatgaagaattgactgtaccaactcaagcagatgtagataacttgagtgagacttttggtaaaactgtcacagttttcagtgatattgccgatgcatatggggatgtaaataattttgcgaaaaactttggtggtaccactaagatttttgctcaaaagttaattactgaactagtagatttcaataatggtattgcggacattggagattccgaaggcggtttagaaaactacgataacgataagcttaatgactggattaatcaagtaatgagcgacatcgttgaaactaatgaagcatttaatgcattaattgatgataaataataaaaagtgtcagtccttaaaatgaggattgacactttttatagttaattgctttttaaactggacattggataaactgtgtaatcagcacggtaaacaaatagacgatgaccatcaatcacaaattgagttgcattcttcatatcactcttatgaattgagacgtgatttccaataaagacagcaatcggcattcctaattggcttctaatcattactactcttgagctaccattccaatcgtttttaaaattctgatacattgtatttaacagaggaacagaacgattttgatcgtcgatcttaacttttttgttaaatgcatcctcgtagtttttcagtccttcataggcaatcatagtagaaccaacgtgaatcattcgattattgccatagtcaacatcaattacgctagaatgttcagtgccattactacttttctgtgacatctttttatcagtatgaatattaactgacttagctttgatctggtcgatcttttgtccattagaatcatacgttgatactgttaagggcaatgccccaatcttagagcgcatagataattcccagttttgaaaatcactacaaccagtcagagaaagcaataatactcccagacctaagaataaagctaacttctttttaaatttcatccttatcttatcctcgtttctatataatgccttaattttaacatggataaaaaagggatgcagataaataaattggaaatgatttgtcagttcatttacgttttagggatgcatcaaaaaagcagcaaatatttgctgctaaaaataaattagaacttgtctgctttgacgtaagcatttttaccaattcgatagtaagcttcattattgatgtaatgtttagggccataagtcttgatcggtgaaccggattttttagtagaccattttgtattaatggtgccatcatttttatacactttagcatcagctttaaagacgcgtgaattgcctagtacgttacttgccatcacatacttgtcttcaccgacacgaatcattgatttgcctttaattctcaccttattgtcataataagcaatagagctgtaagcattataaaaatcatttgtccggttgctatttttgtcataaacatatgacttgtacataactgtagctgttttcttggtattggaagccttaggagcctgtgaaactgccgcgttacctgcgattgataatggcaagactgtaatattgccatcagtattcattccgcgccaattatctgtgaactgccagattgcgacaccatccattgaagggaagtatttaaagttgggttggtctactcggcctgaaatcgcatatgcggctacccagagtgaattaggatacttgttcacgatagatggagtattaatattgttttgcaaaacggaagaactagcatagagaagtggttgatagccagccgccttaatttgatccataaaggcaataatagccttagctgtcacatttttaccattagtaatgatattgccctgaccagtttcataatcgcaggctaagtatgagccagctggtaatcccaacgccttagcagaagaaattgcgtattgcgcttcgcgcttagcggccgatgaacttgaactaaaagttgcaaaatgataagccatcggcatcatatcattagcaatagcagatttaatctgattggctgccttagggttgcgataactggttccctcactaactttaacgattgcaaattgagaaccagccttggcatgagcagttaaatctgcgctttggtagctggcaacatcaattccaagggctttagcaacaactgatgttgatgaagcttgcacaatgctctctgagtcagagaaacgagtcatttgagataaaagtgtgacacctgcattcgttaacatagttgcacatgctaatttaataattgatttccttttaaacaatttatgtcctccatacttagtggagagaatcttatctatatctctcacataatttatactttatagactacagatatagttctcaaaaggcaatagatgagatcatttattaatatatcagtaatcaaaccgaaaaaaattgaaatcaaattgagatatacaatagacaaaaaataaagaattagtcgtggcaagaaatatgccccaaatctaaagaaaagtataagacagtcaaataatatattttaaaagtgacaagaaatagttcattcgcttaaaataaagaaactgtcaaatcttttgtgtaaatagttctttctcgtaaattgattttttaattatttatttaatcaaagtaggattctaaggtgtcctgaacctgaccaaagcctttatgaattcgattgaaataacggtcattgtagctcattgcctgaatgccaataaaagcatcaagcgactgttcagttggaaactctgccttaggcttagctttgcgcttgatcacattgttaaatgattcaatcatgttagtcgaataaattgaagctctgatctgcttgggatagttataaaagaccagcagatctggttctatgtctttcaagcttctgataacatggctgtaaaccttgccccatttggtatagaagtcatgcaggacagctgtggcttcttctttgtttgtctgttgatgcacctgtttgaattcgttcatgatcttttcacgatcgtcgacgcgtactttagcgcagatattgcgcatgacatgaaccaaacagcgttgaaaatgagctttaggataagtcctggccaaggctgttttcatgccaacaacaccatcagaaagaaaaagctcaacttgctttaagcctcgggatttcatgttttgaagcatatctgtccagacttcaatgttctcgctaggcgcaatgcagtagtcaatgacctccttgtgcccattaggcttgatgccaatggcaatatagactgcttcacgctcaaatgtttctcggcgcaaaggaaggtatgtcgcatccaaatagacgcagaaaaacttgtcgcttagcttgcgtttgtggtaagcctcaacctttggaatcatctgcttggaaatatttgatacctgagctggactgtaatggctgccatacatcttttcaattagatcggctatttccctggtggtcacgcccttggagtaaagcttgataatcatgctttccaagatatccgagtgctgcttgtagccaggcagcgtgtgctgatgaaattgaccgttgcgatcccgaggcacttgcacttcaattgggccaaattgcgtatcaactttgcggaaataagcaccatttctagagttgccagtatttcagccatttctggcatagggatcatagcccagaaaggcagtcaattcagcttctaacaagttattaacagcctgttgtagctctttgcgcaataaatcatttattttgtctggattgaatagagcttgagcaaaatctttggtaaaatcattcatgaaggagttcttctttctgtatgtgtttttttgttcaaaccaatcatacgagaaaggaactcctttttctaatgtttaaagaaataaatttaaggaatcattcatccttacacaaactattttacagtctcaaaataaagatagttaaagaaagcgctttgtttaatcagaaatgtgataagatattttgcaagaaagcaaatgtgatcaaaatgctacattggatttgggtattaattgttggtggagtaatcggcttaattgcaggtgctttaactggacatggtaagtcaatgaactggattgctaatattttagcaggattggttggatcttcactaggccaagcccttttaggggaatggggaccgaaggttgcggacatggcaattgtaccgtcaattttaggtgcagttatcttggtaatcgtcgttgccttcattatgaataaaattagacctgcaacagattgagtttattcagatttttattctagctagataagcaaagagcctgattggacgaattatgtctgatttcggctcttttttcgtcttccctggtcagcagaggaggggagatagaggtataataatgaattaaaatgttgcttgtttgtataaagattgagtaaccacgataaattaattcattaaaaagaaatcttagagtgattctcagcattttttgaagattgaaactttatttagatgtcttattcatgtaaaaacacagatttaagtagcgacttgagtcatgagtttagtagaattatcatttttaccgcttgattatttatttaagaaatttcaatatgtgtattattgcagcaaatcttaaaaatagggaataagaataaatataaaagcacttaataccgatttgtatgtagcaaaaagagcaaagaatttataaaatatttttttacgaatttaaaatgaaatacaaaacgttaaaacaataaaaataacaaaagcacaaatttaccaaaattaggcttttgcgagataggtttatctagcgatcattaaaatttttgttttaaagaaagctatagcataaaaataaaaaatggctttatagatactaaaggcaaaactagcaaatattactcaactattttcattgtttttaattagaattactttaccataattgtttcaaaatacttctctttgaaggttgttttattgattattgtcagcatattattcaattcaggaaactgtcaaatcttttgtgtaaatagttctttctcgtaaattgattttttaattatttatttaatcaaagtaggattctaaggtgtcctgaacctgaccaaagcctttatgaattcgattgaaataacggtcattgtagctcattgcctgaatgccaataaaagcatcaagcgactgttcagttggaaactctgccttaggcttagctttgcgcttgatcacattgttaaatgattcaatcatgttagtcgaataaattgaagctctgatctgcttgggatagttataaaagaccagcagatctggttctatgtctttcaagcttctgataacatggctgtaaaccttgccccatttggtatagaagtcatgcaggacagctgtggcttcttctttgtttgtctgttgatgcacctgtttgaattcgttcatgatcttttcacgatcgtcgacgcgtactttagcgcagatattgcgcatgacatgaaccaaacagcgttgaaaatgagctttaggataagtcctggccaaggctgttttcatgccaacaacaccatcagaaagaaaaagctcaacttgctttaagcctcgggatttcatgttttgaagcatatctgtccagacttcaatgttctcgctaggtgcaatgcagtagtcaatgacctccttgtgcccattaggcttgatgccaatggcaatatagactgcttcacgctcaaatgtttctcggcgcaaaggaaggtatgtcgcatccaaatagacgcagaaaaacttgtcgcttagcttgcgtttgtggtaagcctcaacctttggaatcatctgcttggaaatatttgatacctgagctggactgtaatggctgccatacatcttttcaattagatcggctatttccctggtggtcacgcccttggagtaaagcttgataatcatgctttccaagatatccgagtgctgcttgtagtcaggcagcgtgtgctgatgaaattgaccgttgcgatcccgaggcacttgcacttcaattgggccaaattgcgtatcaactttgcggaaataagcaccatttctagagttgccagtattccagccatttctggcatagggatcatagcccagaaaggcagtcaattcagcttctaacaagttattaacagcctgttgtagctctttgcgcaataaatcatttattttgtctggattgaatagagcttgagcaaaatctttggtaaaatcattcatgaaggagttcttctttctgtatgtgtttttttgttcaaaccaatcatacgagaaaggaactcctttttctaatgtttaaagaaataaatttaaggaatcattcatccttacacaaaatattttacagtctctgaattcgagttaacaaatccaaaataagacttatttgctgaaacaattaaattaattatgacttctattattaaattgattgtttttcaatctggctttacataatatgaattatacgcagatatgtcttgaagcattttactgtactctctgccatccttctcgtaaatttgatataaaaaatcatctgcaaaaattacagatgatccataaaacttattcatttttaaaattcaatttattgtttgtcttcaaagctaacagatatacaaaattaatcgctgctaaaaatacaactgcaaaccaaatagtttttaatacccaaatcttttgcagtaacgctgaaacgtttgctccaactgcaaatgaaattgttatcatcatataattaacggctgctgtgtgctgactcttatctgcgccaaagaaaaatgcactccacgcaactacagatttcttcaaattacctgttgtaaatacattattgtatcccatgccttcaattttgctgaaagatgcattttgaacagctaagccaaaagcaattgctggaactatatagtaatttggtacgcttttaggtaaaaatccaacgacggtacaaattactaatattgggaacaaacaaaatactctccaatattgactcttaacgtatttatgaaaaagtcctacaagaagtaatcctagtgaaaaagctataaatgtacttgcacgattgatcattcctggaatattatggtcagccaatgctgaactgaaaaatattacgtttcctgtttgtccagcagataatgtgtgtcccctttggatatatgtataagcatcaataaagccaccgcagaatgttaaagcacaagctaattgccttgattctgaaggcttagcactgttaaaaatatctcgtagattttttcgtaaactcattagtatctttaatcctccaaaatatagtcatagtttattataggctttattaattattgtagttacatttgattgatcgattttattcttattattttgtaaatttctcttaaaaatttacaaggctaaatatttaatacaaggtgttatttgcggtagaatagcctaaaaggttgaggttacgagctttattcactaaataaataagccaatattgatatttaatataatacaagttaacactattaaaatagtttattcattttcaccctaatctttgagactgtaaaatagtttgtgtaaggatgaatgattccttaaatttatttctttaaacattagaaaaaggagttcctttctcgtatgattggtttgaacaaaaaaacacatacagaaagaagaactccttcatgaatgattttaccaaagattttgctcaagctctattcaatccagacaaaataaatgatttattgcgcaaagaactacaacaggctgttaataacttgctagaagctgaattgactgcctttctgggctatgatccctatgccagaaatggctggaatactggcaactctagaaatggtgcttatttccgcaaagttgatacgcaatttggcccaattgaagtgcaagtgcctcgggatcgcaacggtcaatttcatcagcacacgctgcctgactacaagcagcactctgatgttttggaaagcacgattatcaagctctactccaagggcgtgaccaccagggaaatagccgatctaattgaaaagatgtatggcagccattacagtccagctcaagtatcaaatatttccaagcagatgctccccaaggttgaggcttaccacaaacgcaagctaagcgacaagtttttctgcgtctatttggatgcgacataccttcctttgcgccgagaaacgtttgagcgttgagcgtgaagcagtctatattgccattggcattaaacctaatggacataaggaagtcattgactactgcattgcgcctagcgagaacattgaagtctggacagagatgcttcaaaacatgaagtccagaggcttgaagcaagttgaactctttctttctgatggtgttgttggcatgaaaacagccttggccaggacttatcctaaagctcattttcaacgctgtttggttcatgtcatgcgcaatatctgcgctaaagtacgcgtcgacgatcgtgaaaagatcatgaacgaattcaaacaggtgcatcaacagacaaacaaagaagaagccacagctgtcctgcatgacttctataccaaatggggcaaggtttacagccatgttatcagaagcttgaaagacatagaaccagatctgctggtcttttataactatcccaagcagatcagagcttcaatttattcgactaacatgattgaatcatttaacaatgtgatcaagcgcaaagctaagcctaaggcagagtttccaactgaacagtcgcttgatgcttttattggtattcaggcaatgagctacaatgaccgttatttcaatcgaattcataaaggctttggtcaggttcaggacaccttagaatcctactttgattaaataaataattaaaaaatcaatttacgagaaagaactatttacacaaaagatttgacagtttccaaatatgtgttggctatactgaaaataatatacatattatcaacgcgtggtgctagttaaatctttctagacaataagccaaattataagctaaaattgcaatttccaaccggctttgaaagcctatcagactacgtgctcgattgttctcggcattgtaataggtcagaagcgaaaagtcgctttcaattgttctgcgaatagccatcaattgatgatcattgtgctttttagctcctgtcatatttttacgatatggtgtccaaagttcgtaacccatttgttttagctgttgatgcagttctttgcctaaatagccttcgtcgccaagaagatagtaattagatggatgggtattttctatcagttcaactgtctccctggcatcatgaactgatgcctttgttacgacataatcaagaatgtaaccgtcatcgctaacaatggcatgaactttgaaaccatagaagtaaattttcttggtggccttataaccaatgttggcataaccgcgaaaaattttagcacgatagttgcgaattggttggcaaacaggtaccggaaagctgtcaatgatcaagaactgtccattcaggtcaacctttttattcatttcttgccgtatctgataaatcaattgcaatagctgacgtgaacgccgattaaaacgtgagtgtgataaacaattgaaacattcacagaatcttctttgtgattcaattcctgtcttagcttgccagataagtaaagccaaaatcagactgtccgtagttttaatttgatcaatatttcgccgatgagtaaactcagccggtgcatacaaacgataccagtgccgacaaattatcactaaatctttaaaactaacttgtaaatggtggctaaaacgcttaagcttaaggcagttcaatcagatcaggctcttttctattattatacaagttgagtctaacaagattggacttttttattaactaaaacgatttaactagcaccacgcgtatattatcaatgaaaaagtaaagtaataatataactgaaccaattctatttaataagcttacattaggcctttcaagagtccatgggttagtgaattgaagtataaaatataaattttaaatatacagtggttgctagacatcaaattattaataatattatagtcattattatggaagtgaatgaattttgaatatgaattaccacattagacccgttaaccagaagatttaaaagatttgcaagctatttctcgcgaaacatttaaagctactttcgatgcctatacagctacaaatgatatggataaatttttagaaactaattattctgatgaaaaattgaggcaagaacttaataatgctgatagtaaatttttctttttacaagttggaccagaaattgctggatatttgaaagttaatcaagctagtgctcaaagtgaaaatttaggttccgatcattttgaacttgaacgaatttatcttcgacaaaaattccagcatcagggattgggaaaagttttatgcaaaaaatggatttaagtgctttagtcaacatacatatcaagttggaaatgatccacaaattgattatttattagagaaaaattataattaaaaaatctaaaataatggtaatgtcttcctattaatactccctatcgagatttctatatacttatctttcaaacatatgatttgttaattttattaaaaatctttttacatgataaaaataacgaatcgcttcctatgaatatacattatttgttaacatcgccttgatatgagatcaatgacacattcgcgaacatagttcgcaagtttcagaaataaatacctttatttccatattcttacagcattagatattggtggctttataacagtcttgtttcatactgctaaacccagccagtacctcttaatatctaatgccttatgtaaaggctcgtctgtgtcaagttttttctttatttaaaatactaaaagtaggtctgaatctttaaccttacttccgttaatagttttaccatgctttggatgtttcgttatatcctgtgcccagtctctgatatttagactagcgttataatctctaactaggacttgtccgcaattaggacaggtccattctttttctccaactttcaatttttcattaaccattccgcattcatgacaagctttactggtatcataactatctacctctaagagcaggtgtccatcgtcttggtaaatatattccatcatttttccaaatgaagctggctgaaaagtggctaatttatgattggtattttttcttagcccaatagtctttattgcgtctgcatattctcatagtaaaactgtcaagctgttccattgccaaaattgggtagttgatgctaaattccttagccttttgctttcttctttgataaacgattctttcagtttcaacagggaagggcctcgtcttcgtcactgtcaaaactgtcttcatcaaacaagctggtttggccggataaaggcatttgttcttaagacttgccgtagcgtttttgcgttaggtaggctacttgttcacgcaggagggcgatctcttcgtttaaattattaattgtagccattaagccttggatggtctcatcttttgtttcaactttagtcattgggatcccccctcttatttttttgataaactaaagcataccagaaacgcacgcaaaattaatagaaattgcgtgcgtttgtcgtttttattcccggttcgatcgagaagcccttcatcagccagtctacttgctcatccgataaaaccctgacttcattctgattgttgggccaaacaattttaccgttttcgaatcttttgtagagcagccaatagccttggccgtcccaatacaaggctttgaaacgatcacggctgccaccacagaaaataaagacttttccagaaaaaggatctaagttgaatttatctttgactatcgcagctaagccatcaattccgcgtctcatatcggtccgcccacagacaaaatagacctggcccagatcataaagattgatcatgacagtactttttccaaaagtttattcataatttcagaatccagggaactataaaaatttagttcaaggtcgcctttttcaagcattatctttgcccccttaagttttatgagacaaggataaccgaaaagtgggagctaaaaaagatacttaagtttttgatgcttacaatagtactaattgcaactagtgtattaaaaagctttttcatataatgataaaaaataagaggcagttatatcaactgtctcttatttgtccactttaaattaagcgttgaaagcatcagtaagtggtggaacaacttgcttcttacgtgatacaacacctggtaatttaacttctgaatcttcaagtttcttgtcaaatgctttttcaaataaagtcttagtctcgtcactacctacaactaaagcttctgagtcagaatcaagaatgttagtgaccaaaagcataaacatatcatagttgttgtcctttgatgaagcttccatagctttcaagaaagcatctttacgcttcaaagcatctgataaatcaacaacgttgatttgtgctacacgtacattgtgaccgtttaattcaaagctcttagcatctaaatcgattaactcttcttctgacttatcatcgatattagttccagccttaagcattgctaaaccgtattccttgtagtcaacaccagcaatcttagataaagcttctacagcttccttatcttcatcagtagtagttggtgatttaagaagcaaagtgtctgaaatgatagctgaaagcatcaagccagcaagtttttcaggaatttcaacattgttttcgttaaacatcttccatacgatagttgatgtacaacccttaggttctgcacggtagtacaaaggatctgcagtattaaaattcattattctatggtgatccacaacatgagtaaccttaactttgtcaatatctgaaacactttgttgtggttcattgtggtcaaccaacataacagatttaacttctggagcagcttctttaattacacgaggtgctttaaagccgaatgttttaagagcatatgcagtttcatcattaggctcacccaaggcaacggcttcagtgttgtaacctaacttgttttgcaaatatgaaaatgcaatagcagtgccaattgcatcagtatctggattttggtgtccaaaaacaaattctttttccattaaataaattgcctctttttctaattattttatttaatttcttcgcttaatagtttactaaaattattgttcctatccaagttattgtctaagaaaatctgtaattccgttagtaatttcttcatcctaggaacatctaattttcctctacgataaacacaagcagtcgtaaactcaggcatatttttaatataaacaggagtcaaattaatctcatccttatgcgcctcgtagtaagtctgatctacataagtatcaagatcagtattttctgcaattttgatcatttccttagtagatgcaattttaaacggagtaacgagatcaatctttttactaaagttaagtcgcattaatcttgataagtagtaattctccggatatgcaacccactttctgttgccaaaacgagtaacagaatatgtcccttctgcttccacattatccttgtgagtcagtacaacaatatgctcagggcaaatatcacgatgattgtattgatgacggaaattagctcctgttttattagtagtatctggcatatacataatcgccatatcaatcatattggaatcaagtctgtgccatagctctttgcggtcaaagtaatcaacggtaaaagttacttctggatactttttattgaagtaacgtaaaaattggtagaaaagatcaacatgtacagactctagaataccaattgaaatattgcctttatctgactgggtatattcttgaatgtcactaataacaccattaatggtatttagcaactctatcgctgctgcttccatttctttaccagcttcggttaggtataacttcttccccatttgtccaaataatggagcaccaatagcgcgttccaatttttttacttgctgagttaaagccggttgggtaatacctaaaatttgtgcagcttgggtataattcatcgtctcaatcaattgtaaaaaataacgcaatgatttagccgataaaatagtatcacttttagacataacgattatctctttcctaaaatattattttacgataagccatgtcccataacactgctattatctatccaaaacagtgtcaaaacatatgtcttaacactgtttttaaagattaatatattgttttagttaaactcaaatcttaattttgactactaatgggtcttcccaattcaatacttacgggcgtcccatcaacggtagtatcaataacaaatgagccgttagaataacgatcgcctaatggataatccgtagttttaatatttacatgacggtcactagaagtagtgacatgtaacaaatgatcttgagcatatggcattagagcaacaattctatgcggtttattcttcaattcccgcagtactagtacccctcgcttggctctagaaactttattaactagtttaagtttgaattgcttaaatgccccacgttgagtaattagcccaacatgcattaaatcaacgtacttagaatcaactaggacataatttacgatataatcgtcatctttcaagttagcagatttaacacctactgctttagctcctgaagttggtatctcgctaacatcatatctaattgcataggcgcgatgagtaaataatgtgatttccttatgattatctgatttgatcaaatctaccccaaccacataactatcctttccctttaacttgatagctgtcattgcacgtgacttataagttctcgtcggctgtaagttagctaactccaattgtttgatataaccgtcattagtagccagaataaagttgcaatcagtattcaatttatcaaatacaaagacgcgaataatttgctcatcactgtctaatccaatttcttgtgataggtgttgtcctgtttctttccatttggtttcaattagttcatgtactggacgataaatgacattccccttattggtaaataaatacaagttagtcagggtagatagtgtgttttcataaactactttgtcaccatctggtaaaccattgtcatcatcattagttgactgatatgaacgtaaagatgaacgctttaaatagccatctcgactaattagtactctaacctgttcatcagcaactaaggctttttcatcaatttcaactttagcactttcttctgaaatttgagttcgacgtggattagcaaattctttcttgactgcatttaactctttaataatttctttttctaaagttgcacgatctgataataatttacggtatttttcggccaatttatttaacttgtcttgttcagcaattaattcattaacatccgtattagttaaacgataaagttgtaaagaaacaattgcttcagcttgtttttcagtaaatttatacttaactattaaattcttcttagcatcggctttatttttagaagcgcggatggttttaattacttgatccaaaatatccatggcatgaatcaagccctgaataatctctaatctagcttctgccttatctaagtcaaatttcgtacgtttagttacaacgtcttcttcatgttctaaataagaagctaaaattcgttttagcccaacttgaacaggagtcatgtgatcaatagcgaccatgttgaagttataagatacttgtaagtcagtatttttaaataaataatttaaaatattctgcgcatcagcatcttttttcaattcaatcacaattgacaaaccatggcggtcagtttcatcacgaacttctgcgattccatcaatttctttattcagacggatttcatctatcttttttactaatagtgctttgttaacatcgaatggaatttccgtagcaacaatttcttgcctatgcccacgaatttcttgaatagtggttttggcacggacttgaattctaccacgtcctgtcttatatgcttccttaattcccttagtccccataacaatagcaccagttggaaagtcagggccttttacatatttcatcaaatcttcaagagaagcatcaggatgtttcaacaaataaattgttgcatcaatcacttcacctaagttatgtggtggaatctctgtagcgtaaccagatgagatcccagttgatccattaactaataagttaggaaagcgtgcaggtaagactgtaggttcatactcagtatcgtcaaaattaagcaccatgtttacggtttgcttatcaatatcttgcaaaagcatattagagattttgcttaagcgggattccgtataacgcatagctgctggaccatcaccatccattgaaccattgttaccatgcatttcaactaacggctcgcgcatcttccagtcttgtgataagtgcactaaagccccatagattgagctgtcaccgtgagggtgaaagttacccatgatattaccgacagccttagcagcctttttaaatggtttatcataagtattactatcttgatacattgcataaaggatacgccgctgaactggctttaagccatctcgaatatcaggcaaagcacgttcttgaataatatattttgaatatcgtccaaaacgttcacccattacttgttcaagtggcatttctcgaattcgttcttttgtggccattaaatttaaaaccttcttttattcatcttcggattctagaattgagccgtcttcgcccattctgaatttaacattttcttcaatccactttcttcttgcggctactttatcacccattaaggtagtaactcgtctctcagcaagagcagcatcgtcaattttaactctgattaacattctcgatttaggatccatagtagtagcccatagctgttccgcgttcatttcacctaaacctttgaatcgctgcagcgaatagccacgtcccattttcttttcatcatcagctagttcttcatcagtccatgcatattgaacttgcgtctttttgcctcgacctttttgtaagcgataaagcggtggcagagcaatataaacttttccgtgttcaatcattggccgcatataacgataaaagaatgttaatagcaagatctgaatgtgagcaccatcatcgtcggcgtcagtcatgataatgactttatcataattagagtcatcaacattaaactcggttcctacaccagcaccaatggtataaatcatggtattaatttcttcgtttttaaagatatcctgcaattttgccttttgagtatttaatactttaccacgaagaggcaaaattgcttgaaatcttctgtctctaccttgcttagcagatccaccagctgaatcaccttcgaccaagaatagttcattctttttaggatttcgcgattgagctggcgttaatttaccagacaaaacttctttttttcgtctctttttaccattcctgctttcatcacgtgcctttttagcagcttcacgtgcatccctagccctttgagccttcttaactagttcctgagccagctcaccattttccattaaatagtaagacattttctcataaacaagtgaatctacagcagaacgtgcttgtggagtacctaatttacccttagtctgtccttcaaattcaagtaattcttcagggattttaacagataaaaccgcgctaagcccttcacgataatcagaaccatcaatatttttatcttttttacctagtagaccctgctttttagcataatcgttaaatgcacgtgtaaatccactacgagcacctgactcatgggtaccaccatcaccagttctaacattgttaacaaatgaaactaaattttctgaatatccatcactatattgacctgaaaattcaatttccatgccatcttgcttgccttcaaaataaaagacatcactaattgtgcctttaccttcgtttaaatacttaacaaatgatttaattccatcatcatactgaaaaacatcatgatgttctggctcacgctcatctgttaagacaaatttaacccctttaagtagaaaagcagattcacgaattctctcctgaattgtctcatacttatacttcgtggttgaaaagatagtctcatctggcttaaacgtaatggtagtccctgttggctcttttgtctttcctacacactttaatgtacctaccggatgcccaccatctttaaattcttcttcataagctttaccatcgcgaacgactctaaccttcatataacttgaaagtgcattaacaacggatgaacctacgccatgcaacccgcctgaagttttataattttgttcagtaaacttaccaccagcatgtaatacagttaaaataacttcaattgtgggcttacccgatttgtgcattcctgtcggcataccacgcccaaagtctcttacagtaacactattatctgaatgaatggttacatcaatttctttaccaaaaccagccatggcttcatcgacagagttatcgacgatttcatacactaattgattaagaccatgaatatcagttgaaccaatatacataccaggtcttttacgaacggcttctaggccatgtaaaatttgaattgaagaatcatcataagtattagcttttgccactaaaattcctccacttgttcattaatttaaccagcaccatatatttaaaagataatctttgctaaaatagcgatagattaataggagtgttgttaaatatgtttgcattaaaatttgcatcgttgtttattttagcatacttgattggatcattcccaacaggtgtgttagtgggtaatatcttttttcataaagatattaggaaatacggatctggaaatatcggaacgactaatacctttagagtattaggaccagctgctggaatcattgtctttatagtagattttctcaaaggaacttttgctacagtattaccaataatttttaaactaggaccacattatctttgcttgatttttggcttagctgcaattttaggccacgcttttcctgtctttttaaagttcaaaggaggcaaggcagtagcaacttccgctggatttttactaggatataatgtccattttttcttgatctgtgcgttaatcttcttccctatcttatttattacaagtatggtttcattaactagtttgatctcagtagttctaatctttattgcttcattctttttccacgatcttgccttgagcattatcagtggattgctcgtaatcttaatttactggagtcaccgaagcaatattattcgaatcgaacatcaccaagagaatctggttccattcggtctagtgtattggtataaaaagaaacatactaactcaaactaaaattataaaaccagcaagcatttagcttgttggtttttgtttacctaaatattatacttttgcaaacaatagttcgcaagtacaaacaaatatttttattttattataatgatctatttatttcaaaatcttaattaaatcgtctttactcattgttgcatcagcaatctgatcattttgcaaaattatatcagctaattctgctttcttttgctgtaaagcaatgattctctcttcaatactgtcttctgtaaccatcttataaatcttaacagaatgcttttgaccaattctatgagctcgatccgtcgcctgtttttctgcagccaagttccaccaaggatcataatgaattacaacatcagcaccagtcaagttaatgcctgttccgcctgcttttaatgaaatcaaaaagacccctggttgagccatttgattaaacttttgaacttgttcttgacgcttagttttaggtgttgatccagtaatagtaaataaaggtagtcttaatctggcaaggttttcatgcaaaatatctagcatagctgtgaactgtgaaaacaataaaattttatgtccatttgctagattattcttaatcaactcaattgtagcaattaatttattagacttgccgtgatagttttcataaagcaaatgaggatcacaacaaatttcacgtaatttagtaatctgagccaaaatttgaaaacgtgatctcttaaagtcttcatccccctgtccatttaattgagcgataatcttttgcgtctgcatattatacaaatcagcttgtttcttattcattttaacaggcacaatttcttcatctttgtcaggtaagtcacgtagcacatctttttttagacgccgcaagataaagggtattatcatattagctaattgatcttctgcttctttatcttgctctttaacaatcggtaattcatactttttcctaaagtcaggatataaacctaaaaaacctggcattaagtaatcaaaaatactccataactcgctcaatttattttcaatcggtgttcctgttagagccagtttatgatgcgctttaatgactttgactgtcttggcggtaactgattgctgattcttaatattttgtgcttcatcaattacttctacatcaaaaattagattttggtacgcttctagatctcgattaagcgattgatatgaactgattagcagattatactttttagcatctaaaagcaatctctctcgttcttttttagtgccatctaatagagccacattaaggctaggtgcgaactttttaacttctgcctgccaattatagataacagaagcaggcgcaacgattaagctaggtaactgattttgcattttttctttgcgagctaaaagaagactaataatctgcaaggttttacctaatcccatctcatcagcaagtagcccgccaaatttataattaacgatagtgcttagccaattaaaacctatcttctgatatggacgcaaaatattttgcaaactaactggtatttgattttgcttcaactgattcttagctaaatcattaatcagagtattaaaggattcattagttgagaaatgcagtgcattagcagctttcatttgcttagcaaaataaaaggcacgatatgctggtaaatgtaatttaccgtgaatgaaatccttaaaactaatacctaaatcatgcaaagtttgtgccaattgttcaattgtcggttgttctgccttagctagcattccattttttaaaacaaaatattttcgcttttcttggtaggctttcaaagccgcttgaatgtcttcccagctcatcttttgatcagcaagatcgatatctaataattcattagtcaggttgatacctactccaacatccaaattaatctttattccctttaaaagtgatctaaagttagctgtaatttgtacttcgcctaatcgtttcaactcattgataccatcatctagaaaagcttgtacgacatccgagtcttcattggataaaacataccgcccatgctgataatcactaaaatatgtattaatgtgcttccatgctgcggtctctttttcaacatcgcgtcggtcctcttcagtatatccttgatttaactcgtattgtgcatccccatactgtactcgagccacacataaaatactgcctacacgataatctaatttaaacaaaaaatgggcctctggtggcaaaatagctttcaattcatcagtaccagacactaatataaactttgtttgctcaaatttaggcaaaatattatgtgcaaacttagcaacggtctttttactaaattgcatttcagcaccaggctgcaatcctaaattatgcaaagaagcaggcgtaagacctatatatttgatccatacatctttgtaatagccataatacgcatgactcccagtaattatagtagaaactggaagatcctctacactaactaaagcagatgacttttgagtttcaattttaatgtttaaatctagttgatcagttgtatatcctataggctgctcatttgagtacaactttacgccttgataaagtaaatcattaacttcatcggccacagagttctctagtgtaatgcgaccaacctgactactgtaattataataaaattcttcgtttagattacgagcatctataattttttcaataaaagataaccagtgttgactatcaatatccattttagcctgatttataggctcgttgaaaaacttacctagctttagagaagagctgtgtcgggatgcatctactagttgattaagatctttaactttataaagatgcttgttctttcctaatttaaacgtcaaactagggatgttattatacttatcaatacttgcccgcaaaataatcggctcatcattttgggtagaagcgtcactataaaattcaagtagatcttcagcggcctggttagttaaatcaaatggatcgtcatcaagatactcattaataaagtaaaacagagctaatattctaacactatctttttcaatacgggaaaaatcactatcaaatttaattgatataatttgccagcgagtaaattgcacagataatgtaattaactcattgtcctctgttactatctcccaaaaatattcatatttacgcatcttatcatcaaaatgccgacaactactaatcgaccagtgatcattaagttccagtgcctgatcataactttttttggtaaatttcatattgccaatcaaatttaaggggttaagtactgggcttttatgtgcaatcatttgcttaagatgttcagaaattaagtcagcaaaagggactttaacgttatgttcattttcttgttcgttttctactgcaagtaaagccgcaacctcgtgtttacagcgatgccctttattagcccatggacaattacagtctaactctgaagctcgaccatctaaacgaagacgaccagttacagtataagaacgacccattccgccttgaacttgagcggtaaagtgttcctgatcttgagctaattgaatattttcaaccatatcattgccataatatatttctccacgatcaaaaactcgttcaggaaataatctatgccatctagacatttacatcacgctctttcataattattactacttacactatcataattttttagttgttaataataaattgtcacaacatttttagtgagcattttattattaacaaatcatgcgatgatcttataataaaagtatagaaagtacagtattatcatatagacttatataagtatcagctaatgtaaataaaatacagaaaggaaataaaaatgactcggcaattaaaattgctgaagacttagattgctatacagaactactttctggaattacaagaaaatttcagcagtttagttatcgtaagctttatttatatgatattcaaaaaacaattcgtattttaaaaatctaccaggaatggcttttagctcaatcagatcaaaactttagcaagctttatgataaattttgggcacaatgtgaaatggatattacagccgtctctctactgcttgtgccaaacgtacatgataagaagcaggaaatagaacgcatagatcatttactcaatcaaattaatcaaattgggacatcatatttactaaatgacgttcaaagtaacgctgtaggttccgccatgaacaatgctatttatccggctaaccgagctggctagagcaaatttatcaaaatagtcaaagtgaaaataatattgaatacaatcataaactgcaaaatttcttaagtgttcattcagagccttatcctgatgcggatacattagttattttctttactaatactaaataaaagacattggccgtatttaccaatgtcattaagttaagacattgacaaattatcgacttggacttttaagatcattcatttgcgatttatcgcatttgaatgctcttttttcatgccaaataaacccaaatcttgtttagaaattaggctacacgatataaataatatacagctgatttgggtttgagatttcttttgtcttttcgtcctggtctgatcggaattgtgtaatgactaatttgaataagaatctttttaaagatttcagttgaagaagaaattatatacatagcctggatgacaaaacatgactgtttgaaattgatcgcatattgatacttgcattttttttgtggtacatatgcttgagcatcaatttgactgactgcgttaaacataatcatgtgggcatagatctccatttcaataaatctatcctgcttggaatgaaactgtacgctacctaaagcatatttcaactttttgaatgaagtttcaatgccccagcgcaaatggtagatttctttgatcctttttaagggataatcggctctatttagattagttagaacaacttcccattcttctttgcctgatttaggatcattaattctaaatttacaggcacgaaattttattgtacataactctccaaagtcccagctgccatctttggtatttttagaccgatattttatatattgacggtaatgatggttaaccaaatgaacgttttctgtagccttatgggtttcataataataattagaggtagtcacccagcaagctatatccttatcacactcttgattaggcaactcagctacttccttaaatgcgccatatcccgttttagtacgtatgacataataacagttaggcaggcgattacaattttcaatcatgttaaagccggtataacctcgatccatagtaactatatatggtccgcaatttagctttttaagcatttgaacggcggctttacgttcatccatctttgacttaggctgaaagatgcagtcttgataagtattatttaacaggtcatagagtgcattaacatgaatttggcaatatggctttcctttatgattgagatttccaacgatattctctgatttaggattccagatttgattaaaatcagacccatcaatggcaaatatacgatatttatgatcaaataactggatattaaataaattctgattaaatacagttagaatatgcttaaaacatgcgggtgaaagctgacctttgcgttggacataagcggaagtactgactactttatcgttatttttaatagctttttggccaaaagctctaaacaactcactggtcaaatcttttccttgcatattaatagtagttttaatgactgtagctgcatctaaaaaccgcttcctagtgaaggcatgaggatcatcgataaaatcatgaatatgctttccagtatcattgataatttgatcaagacgatctaaaatatttctgtgaagggctttcataattaacaccagctttctggcaataattttgaaggtttaataatttaatcagagggcgaaaaggtaggttcttttcgcctttattttatgcaaaaaaagaaccaaatcataatgattcggttctacagagattagattcaatttgtcaatgtcttaacttaatgacattgccgtatttaccaatgtcttttatcatttttcgttttcattaattcttaaaggatataacctatcatcatgttctgcaggagcatcttcttcgagtaacaaatcatgattaaccaattctttctttagtcgtttcaccgtataagaattgcaatgcatgtcatccattagctcttgattagaataaataatatacatattaccgtcagcatctacccatccattggtttgtgaatcaatcattctcatcgtaagtatcatgtataggtatcatgcatcggggcttaacttcttatacttgggattatgaaaaaatgcttgtggtagcccattttgctgttccgggtagtttccgccctttttaaatttacgaatatttgtatacattttgacctcttcactttacatagctttttcctttacattaattataatgtatatttttattagatagtaataattggacttactagtaaattatgcaggccattaaattaatcagcaatattcgcacctaatgcatttttaaagtgagccattgcccattcatcgccatttgatgtaaaagtagcaacagcagaacgtggaattgtaatttcatagtctaaattatatgccgcaatcgctgtgtgcaatacacaaatatcagtacaaacaccagttagtgtcaggtcatgaatatggcgttcacgtaaataattatctagattagtattttgaaaagctgaataacgatttttatccattaataaaacatgatcattatctttgttttctaaataccatttacccgtttgaccatatacttcacggccagcagttccaataatattatgcggtggatataatttagtttcagggtgatatggatcattttttaagtgcgcgtccatcgggaaaatcacccaatctttattttgtagaaactgtttacacagttctgtaatacgttgatcaattgcttgagcaggctggccacaagtaagagctccatcatcagctacaaagtctttactatagtcgataactaataacgcttttgccattattttctcctttataaaataatatttaaaatatacataattaaattaattattgctaaaatcactattgatataatgaataccaaataaatccagacagtaatattaactaaaaacggtaataatgcagcgtgaaagcctagaaaagaaactaagagaagcataataaaggttataccaattaatcctaaaaaagcatatttgccactacttatatcagcctcgcttaaatcgaatccaccaaaacatagactgattactagcaataaagcaacaattgagtgccatattgaatcaaaattaagctgaaataattcaaaaatataaatccaactatgagttaagaaattccagttaagtgcattaccattacttaataactgagtagtaagctgattctgaaccaatgaaataggtgtattcaatgtacgcatgattatgtaaatcagcaaggtgcatcctaatacaggtgcaatgccaataaaagcattacccaccttttgataagtagatgtaggagaccaagtatgtttaacatagccaagtgacatatcattggtattactagggatgcgcaataaactaaccgcattaatatgatgaccaaaaattatagccataatcaaatgactaagttcatgaacaataattcctaatccgccaacaataatttgactattaaaaccaaatgtatttaccaatttttggttagcttcatggcttaattgtcgtaatgctaatacaaataaagccggaacgagtaacattaaaaaagtcccattaagggcataaagaatatgtttcatctctgatttaaatttgttttacatattgagtcaataatgttaatgccgcaaaaagctgatcaattacgccatcagttgcactgaaatcagttttaacaaactgaataacccaattatttttaattggaattaaacgaacaacttcatcttgaccataattaagccgtaaactattggctaaaatcacttcacgataacgatgtccatcacttcctagccactgtgttgtttgatcagtactttgcttaattaggctataagctttggatatttttcgcaacttattacgcagatcaaaccaggactttatttctactaactcactatttttaacatattcagataattgcatgccttcttgactttgcgcaattctttctaatgtagttaaggcaatcgccatagatttgagcgaatcaattgaaagttgcggcattaaaatttggattagccaattgtgactgaattcatcaggtggatacagtcgactaacttcaagattattttcaaaaaatacacgatatgtattcttacttaggctttcatattctttttcaccatcttgagtgcaatacgtcaaaatgacattatgtttaatttttcgaatggcaaaattatcgtctgatgaaaaaattgtactttcaaattctgtaaaatctgtcattaaattctatctttcgtctataattttatttatcgtgtttactaaaatatattgctctacgcttttttaaactagcaataaccttatcaatgtcttcatcagacattcccctgcgtttggcattgtttcgccattgtaattcactgattggagcacaactaacagtattcaaattcatccatatccagagcgataacaaactacctgcaagacctactagcacaaatgtaccagtaataaaagttaaagatcctacgaaatgtgatacgctccaaagccaaccgaacaaggttatgatatataaaataggcaaaatagctggacgatgattttttccatattcagcattcgggccaaagaaagtttgccaataacgaggtattgagcgattaattactaaatttgctaatgctaatagtaagcaaattagtacagaaacattagacttaattaataaaatactaatagctgacagaatgattacataaaatgtagcaaaattagtagaaaagaaaacccaacgtcgaaatttagcaccattgccaatgattattgcttgcttaggatttaatgttgtctggaaaaacattttatcagttgagacagtttttcgattaaagatatcaaagtgcatctaattctccttacaagcttaattttactacatttctagctatgacttaaatttcaaaaataaaagcggcttacatctcgtaagtcacttccgttaactaattttcaaaccaattccaatcatcgccaaccacgtcaactttagcatcatcggcagctgctgatctgattttttctgcttgagttgggcgttcaattgtgaagccattgttagaatctttttcaaccatgccttcaaattcaactacatcgcccctcttcaaatcaaggtctttgaaagttttcaagtaatgcagtgctaactgcttaacaattggattgccaccagcacctgcaatacgcaaatccttaaaaatagctaagcgatcgtttaatctatcaaaagtaccactaaatttatgacgcttaccatcgtcgtatggttcaagtttttcattgtaaatatctacagacatatgtacataatcttctttctacctctctaatataacattgattttgataaaataaagaggctagataaataaaaatcactctttaatccgattttaacgtatacttttaactgtaacttaggagagaaaatgagcatttattatcaatttggaattattataggtttggttctgttggctttcgccattcacatcgcaatgaaacaacataaaactacctttccattcaacattgtcaacttaggcattgcattcataatctcaacattagcaatttatattattgtagcctgtctaggagcaattcaaccgcaaaactggtacaccaataatgcattatggaaatttttaatagctagttaatcataattgagaaaatctaaaaaagattttctcttttttattaaaatacaattttatttttttattaattgattaatcgagactgtaaaatagtttgtgtaaggatgaatgattccttaaatttatttctttaaacattagaaaaaggagttcctttctcgtatgattggtttgaacaaaaaaacacatacagaaagaagaactccttcatgaatgattttaccaaagattttgctcaagctctattcaatccagacaaaataaatgatttattgcgcaaagagctacaacaggctgttaataacttgttagaagctgaattgactgcctttctgggctatgatccctatgccagaaatggctggaatactggcaactctagaaatggtgcttatttccgcaaagttgatacgcaatttggcccaattgaagtgcaagtgcctcgggatcgcaacggtcaatttcatcagcacacgctgcctggctacaagcagcactcggatatcttggaaagcatgattatcaagctttactccaagggcgtgaccaccagggaaatagccgatctaattgaaaagatgtatggcagccattacagtccagctcaggtatcaaatatttccaagcagatgattccaaaggttgaggcttaccacaaacgcaagctaagcgacaagtttttctgcgtctatttggatgcgacataccttcctttgcgccgagaaacatttgagcgtgaagcagtctatattgccattggcatcaagcctaatgggcacaaggaggtcattgactactgcattgcgcctagcgagaacattgaagtctggacagatatgcttcaaaacatgaaatcccgaggcttaaagcaagttgagctttttctttctgatggtgttgttggcatgaaaacagccttggccaggacttatcctaaagctcattttcaacgctgttggttcatgtcatgcgcaatatctgcgctaaagtacgcgtcgacgatcgtgaaaagatcatgaacgaattcaaacaggtgcatcaacagacaaacaaagaagaagccacagctgtcctgcatgacttctataccaaatggggcaaggtttacagccatgttatcagaagcttgaaagacatagaaccagatctgctggtcttttataactatcccaagcagatcagagcttcaatttattcgactaacatgattgaatcatttaacaatgtgatcaagcgcaaagctaagcctaaggcagagtttccaactgaacagtcgcttgatgcttttattggcattcaggcaatgagctacaatgaccgttatttcaatcgaattcataaaggctttggtcaggttcaggacaccttagaatcctactttgattaaataaataattaaaaaatcaatttacgagaaagaactatttacacaaaagatttgacagtttctataattttcacaatcttagtcattaaaaataacattattcagtttaaaaacctgaagtatatggactttttgataaaagctattatctatgcttgactttacttcacaaagataagacaatgactgtgcagtatatgaaagcggatacaatataaatggtatatctatttttgaaagcatggggaaaataatggatagtttattatttacaacatatgaccaaaataaaattaatgaattacaagataaacttaaccagcttagtcttcctatcaaagtagttggtttagctgaagtagattatgcaccacaaaagtcatattctgaggcaacatttttaagtaatgctagagctacagcacatcgtttagctgaatttaccaatttgcctacattatcagaaagctcaggtctaagtgttgattatctacttaactctttaggaatcttgccttaccaccataatggtcaagatgataaagctaaattattaggctatttaggtggagtttctagtgaaaaaaggacagctagctactacactacctttgtctttacttggccaggtcaagaaagcaatgatattgttagtgctggtagaatcagtggattaattgctaagtatccacatggtagcagtaactatggttacgatgctttattcgtagttccagaactaggaaaaacctttgcagaaatgaatctcaatgagagaaactcaatttcgcaccgcaataatacattaaataagttattgtgtgatttacccgattggtgggatgctcaaaaatctgctcaggcaattaataactagctcactttgaaaattaaactggttaaataatatctacttacttaattcaataacttcttaatactaataaataaatcctaaaaaaggtaggtcaaaattgacctacctttttgtttaagctttacataattaaaaatatttttataaatcttgatccgtcttggtcaaatcactacgatctgaaatccaaacatatagcggcaaattaatcttacctttttcatcgattgcatcaacgactttttcaatcaaaaattcttgccatttctctgcaggttgcatccctgggtgacccaattgtggtaccaaccatccatttgctaatggcttacctgtagtcaaatctacaatcatgccgacagtataattataaaaatcaaaactaccttcaactacaatccaattactactattcatcaattcagattgcagcttagttaacatttccggcggaatctttccttctgtaaccatcattctgcccttaattggaccatttttcttttcgaagtcttgcaaaacacctttcataaaaagcttttgccctaattgatcaaattttgtttcatcttttaacataatcatgtccgctttctttagaatcagtatccattatactaaaatttgtttagtatcgtatcttcacttgtaaattagagtgatcacttgtgtcgtacagcgtctttagatataaccgatactcaggatggtgcttaatcaaaacttgatattctttagaagcatggattttattcaactcgctagcctttatatgattatgaccattaaagaaatgatagttcatccagccaaacaaattccccatcgccctaactaactcgatgtcttcgtgatactgatttaattcactttgcatcatatccgcagaaatactaccaagctgtagatcttttaaatacttatgataatgaactaaagtataattttccttttcctcatccgttaaatatcttgtcatatcaaaattacgccgcacatatgtaatgtgccgtgaatgaactcgcactactccatagccttgatcattagaacaaaaacttgatgtaacgatctcagttgtaggcgtcatgtcttgtggtcccataatattttgagcatgaatatgaccagaaaaagctaatttcacgttgtaacgcgcacacaaacgtcgtagctcaacagcgtcatcaactacatagcccttgttaactgctggattatgtgcatataaattatgatgcataaataaaaccggacgtaactgatgttcctgcgcataacgaaattgtttttcaatccattttaattgtacttttccaatttcgccgtgagtgtgcggtgcttctgttgtctcttcttttccataaatatttgaatccgctaaaactaaaagatattgcggattcagttggacactgtaagccaatgaattatcgtcttcatctaaggcctcacgatatgatttatcaaagatcgagcgccaaaacattgggctaatttcaccagcatagaactgttttttaccacgaaattctctagcccacccatcaaaaatgtcgtgatttccaggtaaaactaacactttagtttctttcaacggcttaaaaatttgagcaaatttctcagcagaaactcgttcaccgttaaatgtcacatcaccagttacaataattgcggcaggcttttttctttgtgccattcgcataaaagcagaaagggctatttcttgataatacaaatccttaccttgactagttttttgcatgcgtgaaaaggcttgtccttcatcatgtaaactatctgcgattaggtgcgtatctgagatcacccaaaattctgtgttaagctcttttgtaatcatttcttaccttctgttagcccaatactgatagaaatcaacccgcaaatttccgttaaatagtttgcgcttcttagtagcctttgcaccaaaacatttttcaaagttaggatctgcagttaagtaatactgactgaacgaactaagcggtctaagtacttctcccatttggcgatacagctcttctgccgactcacgatccttcaatcgcttaccataaggtgggttcgcaattataattccattttctagatcagtagtaaagtctttaactgcgatttgtttaaagcgaatatcttgcaatacacctgcattgtgagcatttaatttagctacttcaagaacagactgatcaatatcactagcccaaatcggtgcttcaagcggcttaacttcactcttagcctttgccaatacttcattatgtagtttagggttaaaccagtcaaaaccatcaaaggaaaatttacgccaggttcctggtgctatatttttagcaattaatgctgcctcaatagctaaagttcctgaaccagtcataggatcaattaaggggtgagtaccattatatggagttagttttaatagcccggccgcaaagttttctttcataggggctccaccatgctctactcgatagccacgtttaaacaaactagcgcctgtagtatctagcgaaattcgagctacatttttataaatatgaatatctaagggatattcattaccagtttctggcaaaaagccacgacgatggtactggtcaaccatcttattaacaattgccttttttacaattgactgtacatctggttcagagtgcaatttggattttacagctctaccttgaacaggaaacttagcgtcaacaggcaataattcggcccaatcaaaatcataaatctcattaaataaggtatcaaaatctgttgctctaaactcttttagcaaaattttaattcggtcagctgttctcagccaaagattagttctaactatatcttcttgaccacccttaaaaaagacacgaccattttcaacacgggtcttataccccatagactgtaattctttattaacgacactttcaaaaccagcgcccatagttgcgtaaagttggtattctttcattgttactctttcattttcaaaataaaaaagagctggacctaaaagcccaactctgcctgtgtgaatttctataagccacgttttgttccaataatctctggcaaagattaccttcagtagtcatctatctttactgcttaaagcaataatccgacctttagttcatttccttaggccgaaactcccccaccaaatttgggtttcacactcgcagggtttacctcgttccaccaaagtcatttctgaccttgcttcgtcactgtggcacttttcaggatagtaatgcatgtccgaagatttagcactttttccgccgtgaagactaacgtcctcctccagcttgttaggctgaatacgatcactacaaacatcgcagtctgtgtgtgcgtggactttcctcagctaacataagctagccgcgcctactcaaaattcacactgttagtcattatagcaaaaattaatgctttaatccataaacgtgttgttctagattataaacttttctttccaaagttgaaatccgttgaataatagccatattagtcgaaatttcaccttgagtatcatctgcatcttctgcaaacttcacaggcgcacttcttctatgcgttggcatataagtcttaaccttttcttcttcagcctcaactgttttctttgctttttgcttttcatccattaattgacgttggagcgtaccgatctgaccatacaaatcttcgataatttgttgaaaagtagtataatcagaaattacttcatctaagtatgcatcaacttcatcgggatcatatccctttactttacttttgaattgtttctttaatatatcttgtcctgataattttatatcatttaaatttgccatcttactgacaactcctttacattccaccctattttagcaaaaacaacgctgactgaaaataaagaaacagactttaataaaatttttaccatattattcagaaaaatgatttatttgatgattttcttggtattcttcagctgcatcttgtaaatcataaaaatcaattaaatctaatggatattctttagtttcctggtatttttggattaaattataatcatatttaggtttacctgggtgctctgaatcatagatcatcaatgctcgatcagtatgctgaatcataaaattttgataattacgtaattgaagtggactttgataaggggtattagaagttgaagcaaaaaagtccactttttccttcaaatttaagaatttagctttgttactatcattccatcgattagcaaattcttcatatggaatcattattgatgttcttaccggatatttttctcctaattcaagtccaacctcagctgtccactgttcgacaccgaggttagctccagtaataatccagtccaattgcccatcatccagtagacttgtcagataattttttagggcatatttaatgacagttatcttgggatcacgatcgccaaaaacatttaattcatagctgcgatagccagtcacccataaacgctgcatttgtttaagcccccctttatgttcaaaaatgtagtctttattgctataatgctaacaggagtgaggacaatggtcaaatatcctagcggtagtttagccgcatttagaaaacctgtaactaaaaaagatgaacatccagttcaccgatcatatcatcataaaaaaggtgttaacttttctgatcgtgggatgacacttgagcaacaaatcaatgaatctaataaatattatttaatggaagaaattgcagttgttcataaaaagccaaccccaattcaaattgttaaagttgattatcccaaacgttctaaggcggtcattcgtgaagcttactttaggcaagcttcaacaactgactataatggtgtttataaaggatactatctcgattttgaggcaaaagaaacacggaataaaactaacttcccattaaaaaactttcatgaacaccaaatttttcacttggacgaatgcttaaaacaacaaggaatttgttttacaattattaggttcgctagcttagagcgctactttgttactccagctagttttgtaattcgagcttggcgaaaaaaagataaaagctcaatgactttaaaagaaattgaaaacaattcttttgaaatcaaaagtggctttcgtcctacactgccttatcttaaggcggtagataaattcattgcagataggaaaagataatcatggcagataataacaataatatgaaacgagaatcacgaagagactatcatggtcgaaggccaagtagtggccacttatggattagaatcattaaatggatctttttgctgatatttttaatagtaatctctggaatcgggctttttgctttttatgccaaagatgctcctaacattagtcaggaccaattgcagagtggtaaatcttcaagtctatatactaataatggtaagtttttactatcacttggttctgaaaaaagaatttatgttaaaaataaagacattcctcagcaattaaaagatgctgtagtttcagtagaagacaaacgtttttacaaagataagttaggcgttgacccaattagaattattggttctatgttaactaatgccaaaagtaatagtattgctgcaggtggttctactataacccagcagttagttaagctaacggtcttctctactgctgcttctcaacgtactctgaagagaaaagctcaagaagcttggttagctatgaaagtccaacatgaattcagtaaagaccaaatcttagaattttatattaataaagtctttatgaactatggaaattatggcatgggtactgcttctaactactactatggtaagccactaagtaagttagatttggcacaaactgcattgattgcagggatgccgaatgcacctgttgcatatgatccatatctttatccgcaaaaggccaaataccggcgtgatattgttttaaagactatgctacaaaatgacaaaattactaaagctgagtacaatcaagcagttgctgaaccaattagtaagggacttaaatcacatcgaaataataacgagtctaagattagaaaaattgatgatccatacattaaagaggtaatttctgaagttaagagcaaaggctttgatccatatcacgataatttaaagattactattaatatcgatcaaaaagctcaaaacaagctgtacgagttagctaacaacggttctgtaccttttacaaacaataaaatgcaaattggtgcaactgtagttgatccaaacaatggtcatgttgttgcaatcttaggtggacgtcacttaccttctgttcaattaggattagaccgggctgttcaaactggacgctctaccggttcgtcaattaagccagtacttgactatgcacctgctattcaatacttgaattggtcaacagcaaaaatgattgatgacagtaagtatgtttatcctggtaccaatatccaattatatgactgggacaacaaatacgacgggatgatgactatgcgacatgcattggagcagtcacgtaatgttccagctattaaaactcttgctgaagttggagtaaaacgggcttcagcttttgctcgccgaatgggcgttaatgtttcaccaaaatctggtttatcagtagcaattggcgctaatgcgtctagtttacaaatgactggtgcttatagtgcttttgccaccatgggcgtataccacaagccgcaatttgtttctaagattgaaacaccagatggattaaccagaaattatgattcaaatggtgtacgtgtaatgaagaaatcaactgcctacatgattaccgatatgcttaaaggcgtaatcaaacgaggctctggtactaatgcaaaaattgcagatctttatcaagctggtaaaaccggtactgttaaatactctgatgaagatctagctaagtacccaagctataattcaactccaaaagattcatggttcgttggttataccagatcatatgttatgggtgtttggactggttacgataatttaaaggacggtactatttctggaataggtcaacaatctgcacagctaatgtataagagtatgatgacctacctaatgaacaataagcctaacctagactggaaacagcctagctcagttgtaagagcgaaaattgtaaataactctaatcctccagaattagcaactggtggcggcacttggcaattatttgttcgaggccataccccagccggaattggtaatagtgcagcaagttatgatgaagacgatgaagaaactgatacttcaagcgataatactggaactactccttcatcttctagaactgcagttactcaatcatcatcaagtcgtgaaaatggctcatcatctcaatccaatagcagtcagcgagcctcttcctctcaaagaagaacacaatcttcttcaacacaacaaagttcatcaacgagaaaacctgaggaagaatcacatgaacgtaatgatgattcggataatgactaggcaataattaaatatatttattaacagatagcgttttgttatctgtttttattttggccgaaacgtagttgaggcctgaaattataaaatcaaaatttagtaacaacagattatataaaattattcaataaaaaaagccgaatttatttcggctttacttttcggaatttaaataagaatacggatcgcctttagctcgagctggcattgtataacgaccaaatagaatcatcgcatggtgcgtttttatccattcacttttaggtaaaattgcttctaatcgcttctctacttcatgtggagtagctttgtcatctacaatatggaactttttagaaatccgtgacacatgagtatcaacagcaatagctggcacaccatagccttcagccaaaacaacgttagcagttttctctcccacccctggtaaggtcatcaataactttttatccttaggaacctgtccattatatttatcgaccaaaatttgcgcagtggcctttaaatgtttagcttttgaacgaaatagaccaatagtttttatctcatgctcaatctcttcaattggagcttttgctaatacttctggggttgggaacattttactaaaactaggcataacacgattaaccatcttatcagtcgtttgtgcgctcaacataaccgcacaaagtaaatgaaagttagtatcccattgcaattcaccttgtgcgtcaggatacaatgctaaaatttttttcaaaactctacgtgcttcttcatcactcaataaatcttctgtcatttttatcgattccttttcaaaaatctctcaacttcatcagttgttttcagactatgcctttgccaattaagtaaaacacgatcaatatactttaaagaatatgcctgagacaatacagcctctcgcaaagcaagttcaattaattcaggagcatagtgatccacacttaaccattgcgcaatctcttctcgttcaattggactcagatagcgaccaaattcaacttctacttttcgtgacaaataatttaacggattattttctaaattattagcaactgaaacagttttatcttttttcttatctttgatcaagacgttttgatcaatatagtgatcaagtgcattatacaacttattgagactatatttattaccaattttatcctgactatcagtcatttgttcaatagttaaataatttcgttcaattagccgctgaataagattacccacatcactaaccgataaattagtattagcagcaatcttttcattagatggaaaactctcacctcgttggctaaatgcttccaattggattatcaaaattagttcagcatcactaatgcctaattgagggtagtaagcgatcaatccattttgtaaggttgtaaagcctaatgcccgataatcattaaattccaaaataatttcctttcaaaaacaaaagttgaactaataactagtccaactttgtgtatcaatatttaattattaaccaaattaaggttgcattctgttaatcaatcttgggaatggaattgcttcacgaatgtggtcaaggtgacaaacccaagcaatagtacgttcaaagcccataccgaaacctgagtgaggaactccaccaaatttacgtaagtcaaggtaccattggtagtcttctaaattcaaaccagcgtcaagaatttgttgcttaaggatttcgtaatttccttcacgttctgagccaccaaaaatttcaccataaccttctggtgcaattacatcagcacataagtattccttaggattatcaggattcttcttcatatagaatggcttaattgaggttggatagttgacaatgaagactggacgatcatattgttctgaaatatagccttcatctggagcaccaaagtcatcgccccacttaatatcacgtccagcatcttgaagcattttaattgcatcatcgtatggaagacgaacgaagttaccttcagtagttgggcgaagtttttcaggatctctaccaagaatcttaagttcatattcattattttctagaacttgcttcaccatgtaggcaagatatctttcttgaatatctaacgattcatcttgatgcatccaagccatttctggttccatcatccagaattcagtcatgtgacgacgaccctttgattcttctgctctaaaagttggaccaaaagtaaagatcttaccataagccatagcaccggcttcaccatacaattgacctgattgtgaaagatatgcatcgtggtcaaagtattctacatggaataattgagtagtaccttctggagctgaatgcataaagataggtgcatcaaatttgataaagccttctttttcaaagaaatctacagtagccttaaacatggtatttctaatttgcataatagcaaatggtttctttgatcttaaccataagtggcggtgatcaagtaagaagtcaacaccatgttccttattaccaattgggtaaccttcattgtttgaaaccacttttaaatcagtgatttgaatttcataaccaaagtgtgaacgtgcgtcttcatgaacagtaccagtaatgtaaaaacttgcttcttgtctaagtgacttagcagcatcaaatacttcttctgatacatcattcttacgtactaccccttggaaaaatgcagtaccatcacgtaattgcaaaaagataatctttccgcttgatcgtttatctgttaaccaaacatgcatcttgacttcttcatcaacatgtttagaagaatctttaattgaaatcaattctgtcataaaatcctatccaccttttcatcaattatacagtttccataataccaaagtttctataaattatcgacttctgagatatcatttccatttttgaattcatataaagtataacctagattgccgttttgttttttgtaggccacttcccaaacgacctcacccttataccaaccaagattaatattatttattgtagcatccgtatggatagatttaaacttatttttaatcttagattcagtgattcctttggccgcaggatatagatatgcctttttagaatttggcaaataaataaagtaatattgttttcccttattattggtgcctgctatagcatagctgctagtgccgcgatctaaatgataatagttttgaatctttctaattggtgttttactagtagccaattgcgtaactttttgatcattgccccgacttctagatccagcataataaaagatagcaatgctggctagaaaggcaactattatcaaaccaattacccaactcacaaacttgattgtttgtcttgtatcatcttgtaacataattatttattttctaatttcttttttaattcttctctagtaaccttttcaactttgacaggaatcgtttgaaggaactcttgaccataatctttagtccataatcttgggtctaaaattacaaattgaccatgatcctgttctcctctaattaaacggcccattccttgtctaaaacgaatgacagctcttggtaaactatctttagtaaaagaatcgattccctgatcttccaatttcttctgccttaaacgaacttcaggttgatcaggagattcaaacgggatttttgccgcaaaaacagtatcaatcccacaatcatgaaaatcaattccctcccaaaaactatcagcaccaattataattgactttttagcaattacaaacctcttagcaattcggttattggaaccagacaatccctgggctaagatttcaaaatcttttagctgtggctcattcataatcatggtaaaaacagttttaattttttctaaattagtcatcaaaacaagtacatggtgcttatcttgaatgtcactaagtaaaatttgtgcaataatcttttcaaattcttcactatcagggctaggcatattattaactgccagtacctgtaaatgcttttttatattaaaagtacttttaccaatatattcaaccggatgtaattctgttaaagctaactggttgattgcatattcaaaatttcgattactggttaaagtagcactgacgaaggcaatatggtcaaaacgactatagatttgttttaatacttcaccagcatcaagcattaaccagtctaaattggtacttagtggatcatcaagattagtaatcatcaaaataaagccatcttgctctaaacctttttgatcagaaagcaaatcagccaattgatagcccttttcagagtaataatctaggcgatcaatttgttccgtaatctcattgactaatacctcaacattagccagcatgcgttcttgttcattatataattcaaataaaacctgattagttaagtccctaacctcttctaatttttgttggaacttaggtaaaatcgctttaaacttgctatttccgccaaataaactttttccttgaaaactaagttctagattaccattagctaaaactgtccgattaacagcattatctctttgaaaataaagttgcttttgtaattcattaattaactgaattaattccaaaattttaggatctattttctttagtaaaaggttcagctgcacatcatcattaaattgcgcttcaacactttcatctgagaaataaagcaaattacggagatgacttaaaactccccacaaagcttcaaaacgcaaagaatcattacgcgaacttacgacattgtctgtgaaacgatgagcttcatcaatgactaaatacggattctgaccccaaattgtatccatatagtggttagccaaataagcatgattagtcaccaatatatccgcttcttcttgtcgtttacgcgctaaattccaaaaatcgacccctgcaaaacggctacctactcttgcatcccctggatgttgaatctgtgcaaagagtggtgcattatagttagttaaatttaattcatctaaatcaccagttttagtcttagtcagccaaaccagtatctgcatctgtaatatcaaggtttgcttattcggtgtaccttgaaaaatcgtctgtacaaatccgtcaaggtcaaggtaacgactacttgacttaactacttctgcagtcaaatccaacttaatcaccttaaataactgcggaatttcatgttcaatcacttgttcttgcaacactttagttggtgtagctacaactaattttctaccagaataaagctgataagcataagcaaaaagataagaaaaagttttcccagtcccgttaggtgcttcaattagcatcgcccttttatctggatcattaataaactgatgcaaatgattaattaggtcgacttgagctctacgaaagtgtaaatgatctttaaatagcttttgtttctctgagtcagtctttgggaatttagcattcccaccatgtgcttcagaattatcattttgtttttgcagaataatattacgcacttgcatatattctttacctaaaggccgtttttcttgacgtaaattatctgcaatcgttgtaatcacccaagaggtatcccgaataagcccatgagataatgaactgagggtattcagtgtagcttgaggtagactttctaatttattaaaaatttcaagcaataaaactgcagtcccataagcatcagaatctgccttatgtggatctaaatgtttaatccccaattgtgttgtcaaatcactcaacttataagatggaaaagtcggaaaagcaatcttagccagttctacagtatcaattgctttatttgtaagtgcctcataaccatgttgcactagttcataattcaaaaaaggcaaatcaaagtcaacattatgagctacgaaaacagtattttgcaaaattttagtaattttgggtgcataataatcaaaatctctttgttttgctacatcttgatcatgaattccggttaaattaacaactgattgtggtatttcacgatgcggattgatcaaaaatgaataagttttaactaccttgagatttttaataatagcacacccaaactgaataatatgatgcccattctcacgttgcgttcctgtagtctctagatcaactacagcaaatgtatctttagtaaaactttttgccataatttcctccttcctctatttcacttcaaccgcttgtttagcatcaagcagaattaaatattttccaataacttttttttgactaaattcattgatagcttgttcatatagtctaagctgacctgtatatttttctttaatcaattcaattgattcagataaatgcgattgatcaacgtggtcagttttgtagtcaaacaaaataataccatcatttttgacaaaatagccatcaattgtaccatgaaccaaaattttggcattaggatctgaaaagtttttaaacaaagttttagcggagattaaactagaaaaatctatttctcgctttaaattctctggcttttgccaaaattcctcggcaaaattgctatgaacaaaccactcaatttggtctttctttaaactagaaacaatttctggattcagtttcttttgcttaatcaattcttgaatttctacttctagttgatcttcagcaccattgccttgataatcataatactgcaaaatcatgtgtgtagcagttccgatttctgcaccagtaaacttagtttgatacaagaaattaggtttagtatcaatcggttgtaaataacgattagtcgatgtcaataagtgggcattctctaattcggtctcgatcggatcgttgaatgctttttttatttcagataccgcttggtaagctgtagtttcactagcatctttaaacggataattaaattgataaagccgtttagtggtttgatttaaaaggttactttgcgttttatcattacttgtctccgctttctgataatcaggtagttcaccgttagcattttcataattaatatataaaaacgactgactcttatccaacgaattagtaatatcagacattttcacagctaggtgtcgatctaaagccaacgcaggtcccataaaactcaatggactagtggaagataacttatctgctaatgataattgaccaatctgatttagttcagtcgaccattctttaactcgtttatccagattaggaacatcgccaaccaaaattaatttctgcttagcccgcgttaatgctacataaagaattcgcgcttcttcttctaataattgcctttttttagttacatttcccatcgctttaactaaagagtcaatccgataatgttcttcacggagcgtaattcctatactatctgagctaatcacatagttaccttttaaatcacgcatttgatatttatgctgcatccccacataaaacacgatcggaaattctagtcccttagaaccatgaatagtcattaatctgaccgcattaccagcttctttagttaataaaggctgtgccaagtccttctgactttgccgcatccgattaataaaattgataaattggtataatcccttgaaccctgcactctcatatgaagcagcacgttcatataaagcttctagattaactcgtcgctgttcaccattaggtagtgcggtcattatctctaataaatttgtcctagcataaatgctccaaatcaattcagaaatacgatgtgccgtggcaaacttgcgcaaatcagctagttgatttaaaaaatctttgattcgagtacttaattcatctcctacacctacataagaagtcaatgcactatagaaagtagagttcttactcttgatacgaattttagctaaatccttttcaccaaaattaaacaaaggcgaacgtaaaactgaaactaatggaatatcctgatcgggattatcaatgatctttaagtagttcatcataacagtcaattcaaaagtttgaaaataattcttcgcatcagttacaaataatggtatatcctgcttagcaaattcctgcattatttccaaattatcactacgacttctagtcaagatagcaatatcactgtaacgtaactctctcattcctgttttactatcaaagatttgtacacgctcttcttttagttgcttaatacgtgctaaaaccatttgaatttcagaaaaatctatctcattttcatcttcattactgctatttttcttttcatgaacaattacttcactagctttaggagtgttttcaggataatacttagcaccaaaaattaattgtccttctttttgatagtcaatcccgccaaaatctgaacttagcacacttttaaatacttgatttacaattttggtaaccggctcagtagagcggaaattatctgacaacagaattcttttggtttgtttattatcatcattggcaaaatcatggtattttttcaaaaataagcttggctctgcttgtctaaagccatagatcgactgctttacatcaccaaccatgaaaagcgtatttttatctttatttttgatttgctggatgatattttcttgcaaagcattaatatcctgatattcatcaatcaaaatctctttgaatttattttgataaaattcacgagccatttgagaattcgatgtatcttgactcaaaatctgataagccaattgttccatatcactatagtcaagcaaattttcactgcgcttcagcttattaaaccgatcaatcaaggctagctcggatttagcaattgcagcaacaatcttttggccgcgctgcatgactttaatttgttcttgttcatcaacagcaaaaaatgaagtaaaagtatcaaaaaccaaattttttgcttcatcttttaacttttgtaggtcttcataaaaatttagaacatcttcatcccatttacttgacttacgataattcgctgtaaaaacacacgaacgtaatagttttcgttgtttatcgtagtctgcatcattttctaaagcaaaaacaaaatgatctaaattttgtgcaaacaaggtaaaagcttccttagccttagctagctcttttgtttctattactggattttctaaataatcattaattttcccttgtaagtcgccaatactagtaagcaagtatggcttaatctgtttttgccacaaatcagattccacgatactgccattaaccacgtaaacatcaaccaatttttttaaccatgagcgatactcaggtttggccatggcaaaatcatacaaatccagcaacaagtcgcgcggactatccgcatctctatcccctgcaaagttatcataaaaatgcctaaaatttacgtctttcttttctagaaactccccttcaatttcacgtaatgcacgttcttttaacaatgcagcttgagtatcatcagttagaatactaaaacttggatctaagtttacagagtaataaaagcgatggattacttctagacaaaatgcatcaattgtagaaatattagcagtatccacttgatttagctgctcacgtaaatatctgcgattagatcccggctttgctaattcagctgataatgcctgtttaattctagttttcatttcttcagctgctgctttggtaaatgtaattactaataattcatcaacttgggttcccgaaagaatctcccttaaaacgcgctcaacaagaacagttgtcttaccactacccgcagaagcagaaaccagaatatcatgaccacgatcatcaattgcttgttgttgctctttagtaaattgagacaattttattgttcctttcctaatttctctttgattttaagaattaattcttttttattcagattgtttatttcatgatattgattttgacgcagcatcgcatcaaaaaagaagacatcacgataatcagaataagttaaggcattcttcgctttgccataacgatatggattaagttcaatttttccagataaaatttggcttgatgcttgtcgaataagatactcatcgtattctagcagtaattcaatttcttcctcactaaagttgcggtcacgtggcaagctaaagccacctctagccttagttttaaccccagtatacagttcagaagaatagctaggatgatcatcaagtaatggctcagcttctactaagatttctggatcattgctgattaagccagtatacatcagcttgggcttactatcagttgctccctttttcaaatttaaactactatcaattagtttattgctattcaaacgttctaattgtctagtaacagtttgataaaaagcacccaataatgaaagacgatcttttccagcaaaaaattgatcatttttagtcaaaacatccaaataagaaaccatctgtaaagcaattccgttataaaacatcccaagatcaaattttttagctgatgacttgtaatcaataacctgggctaaaacttgatccttatcattgaaattggccaaatcaacccggtccattttaccgcgcaaatcaactttatgttgacctgatatatctggcacttttaagcttaatcctttgattttttcacctaacccaaaacttaattcagaatacttagcccgtaacggggtttccttcaaggagcgccgccaattatgagctaccttagaagtagtatggtctagacacttgaaaagatattgattaaaaggatcattcattaattgagaatattttccttcatccttcatcacatttcgcaccgaattaagcatttgttccagttctatgctgcttaaatctgctaagtcggtatgctgcttgtttagttttttcactaaacggtcaaaagtctcgtgaaaatagtttccagcctgaataacatcaaattcattttcaaaccgtcgccgcagcttaagcccataattcaagaaatattcatatgaattttcataaaaagtttccagttgtgacacagatgaattcaagttttgaccatacaattgactagccaagtcctgaccaatattttctggctggttatcaaaatcacttgcttcaagcactgtcttcgttttttgaggtagttgctcctgtgtgatttttaataactcttgcacagcaagacctgaatttattgaattcatataggttaaatagcctaaacttgcatcagggttagtaatgaaagacaaaagatcctgcatcttttctggcaaatcatgttgaacaaattgctgagcaccataatcctttaaacgttgataataaattgaaggatcaagctcttcatttgaagcattaagtactggataagatacatataccctatcttgtgctaaagctagcgacaaaccaaactgataattttggtctaagttattaagctgttgactatcttctaagtaagattctgaattaaaactattttgtagctgattcaagttttcagtagttaaaaaacctggcattttctgaatttggggtaaattattagcagtagcgccaatgataaacacttgcttatagccgctagtttgtaccatccccatttcagaaaggtttaccgcatcaagtgttgaaggaatttgggaaaaatttgcttctcggaaagcgctaattaacatattaaagaattcatttaaatcaaaagtttcaggattaattgctaaatagtcttgcaacagctgcattaataaatcccataattgctctggttgctgcgcctgctgtaaatcaccggcttcattggcctcatcacgccatttttctaatcggtcggcaattccgttcttagttaagaactcaaaaaatatcgttaacgccttttgactatctttttcttgctctattattttgaaaaatgttgaaatcttatcaaccaagtagctgcgcaaacgatcgatcttagctacttcatcatccattttgtctaagcggatcacttcagcattcacaaaattatcaaagtgttttttccataaattatgattaataccatgagccagaacaaaattctctagttcatcaacatcatgaatatactccgcctcttccttataccaagaaggtattaacaagtgtgtctttaggatggctagcatattttgtgtttgaaacggattctcatgtaagttaaataagctttcaattaaaacaaccagaggatgatacttcatttcctgttgtaaatcattaaaaaatggaatctgattttgacgtaaaattggcgtcaaataagtctcgtattcctttaaatttggagctaaaatcaaaaaatcatgatagcgatagttgcttagtgctacctgttgataaatagtccgcgctacaaaataagcctctgcatatcgagagtctgctttaactaattgtacctgcttcaattcgtcaactttaggaattgtctccgtccaaagactatttaatatttcacgaccatttgattgcgaattaagcggaaaagttgctgtcacgtagtccatctttctctcttgtaagaacagcgttaagcgcttaatagtttgctggattacataatcataatctccttcttccgcactagaattaatttcacctaagcgcgttttaaatgcaaggattacatcttttgctttacgcatcaaaattttaatcgttagtgtttcctgtaatgaaaaatgtgaaaaatcacagaaataaaaactggcttgctttaaatttttacttttagctaaaatttcatttagttgcagctgaacctcattcttagtagagaatttacccgcaatttctttaataaaggcatcatagataatccgcaaatcatgtaatttatttttagtttcttgatctaaattatcctctgatatctcgtctaaatctaaatttccgtcatagacttgcaaaattgtctgataaagctgatttactaatccagaattaacattaacattttcaaaaatagtcaattcatcttttttgttctcaataatatgagctaagagcattgcactagctgcatcatctagttgattaggcaatccttgctcggcatcttttaagaaaaaccaagctaaacgcgaaaaagacaaaacatgcaaatttttaactgcagtctcagtttgttgtttgcttgttgctaatttgttaattgccctaacttctgtggtaaacttaatatgattaggaacgatgataaaagtttcttgttctgggtgttgctgatagttttcaactgcttcttccagaattttttcttgtaatgggtcggtttgtcgtcctgtaagaattttgatcatttgttcgcactccttgctttttattttatcatagcaagggcaatcttttgtataaatctagtttaaggatgattaaaaatgaaaagcagctatttagctcatggcaaggtaattattattggggagcattcagtagtttatggatatgatgctttagctatgccaattaaggctttacacattaaaactactgttgaatctgcttctcaaatgtggatggataccgctcgctaccacggtccattatttgaagcaccggcagaatatgatggcctaaaatacgtagttaaacatatgcaaaaaaaggctggcaataaccatccacttaaaattacatacactggtgaaattccaatggaacatggttttggttcaagtgctactgttgcattaggtaccactagggcaatgaaccaattctttcagctgaatatgactgaaaaagaaattatgactgtaactaatcatgctgaaatgatcaatcatggtaaagcttctggtcttgatgcagccactgttaattcagattatctagttttttttaataaaaaaatggggcctaaaatattacaaaccaaattaggagctaccctgttaatcatggatactggtcaactaggcaatacaaaggaagctgtttttttagttaaaaaaatgcttgaaaagtccgactatgccaagaaaaaaatagctcgcttgggtgaattagcggatcttactaaaaaagcttggatcaagcacgatcgtcaagcagttggacagatttttaatgaagcacaagaaattttgcactcatttgatctttcaacaaataaaattgaccaactgcaaaaaattgccttgtcaaataacgctttaggctttaaattatcaggcggaggtcttggcggcattactatttccttgtgcgataacgaaactgtcgcccaagaaattgcctctaaatgtaaagatttaattagtgactactggattgaggagatttaatgaatagaaccgcacgagcacatacaaacattgctttaatcaagtactggggcaaagctgacgacaaattacgtcttcctttaatgtctagtttatcaatgactttagatgctttttatactgatactagcgttgaaaaaacagatggtgaaaatcaatttttcttaaataatcaacagcaaactgctgcagctagtcaacgtgtttttgcttatctaaaaaaattgcaggctcgttttcacgtcactggcaatttaatcgttaaatctgtcaatcacgtccctacttctgcaggattagcatcatctagttctgcttttgcggcactagctgctgctttttgtcaatgctatgacatcaacattgatctagaagatttatctcgtttagccaggattggatctggttctgccagccgctccgtttatggcggttttgctgtttggcaaaaaggtaatagcgacgaaacatcttacgcatatgcactagatgaaacaccaacgatggatcttcaccttttagcagttgaattaaataccaaacaaaaaaagatttcttcgacttatggtatgaaagatgcccaatcttctccatttttcaggccctggcttgaacgcaacaattcagaattaaatgaaatgatcaaagctataaaaagtaatgatttcactgccctaggccagttagctgagttaaatgcaaatgaaatgcatgcaattaatttaactgcacagcctgaattcacttactttgagccgcaaaccattcaagctattaaattagttgaacaacttcgtactgaaggaattgaatgttactatacaattgatgcaggaccaaatattaaggtactttgccaattaagaaatagcaaagatatcattcaacgcttttcgtccgaatttaataatgttaatatagtgaatgcaagttttggtcctggaattacttatttggactagttgtaattaaaaaagttaattagattcgaggatttagttcttttgataacagaaaaagcgcccggaaagttatatattgccggagaatatgcagtattagagcaagattgtcctgctattttagtagcagttaaccaatttgtacgtgtgtcaatcactaagagtaaaggggcaactggcttaattcactccaagcaatactcacaggattcgattcattgggttcgtcagggctcaaaaatggtaatcgataatcgtgacaacccttttgaatatattttgtcagctatttcatttactgaacaatattgtattgagcaaaatatcaagatgaaagtctatgatttacacgtcaattcagacttagattctgcagatggtaaaaaatatggtttaggttcaagtgcagccgtcacagtagctacagttaaagctatcttgcgtttttatggcgtaaaaatgagcaatgaactggtttataaattatcggctatttcacactattcagttcaaggaaatggctcagctggtgacattgcagctagtgtctatggcggctggttagcttaccaaacttttgacaaaaaatggttaaagcaagaattagctaataagactttagttcaagtcgttaatgaagcttggcctggcttaaaagttgaattactaactcctcctaaagatatgaaactgatgattggttggagtcaaaagccagcatcaacttcacgcctcgttgatgaaactaacgctaataaggcggctttgaatatggaatataaaaatttcttagcagcttctagagcttgtgttttaaagatggttcaaggtttcgaagcaaacaatattgctttaatcaaacaacaaattcgggctaaccgtaaattgttgcagcactttgccaaaattaaccaaattgccattgaaattccacgtttatcgcaattaatcaaaattgcagaaaattttggtggagctgctaaaacttctggtgctggtaatggtgactgtggcattgtgattacagatgctaataccgatgttgaagcacttgaaagcgaatggcgccataatggaattatgcctcttaattttaaggttcaccagattatcatggctcattgatggagagttctatgtcgattagatctgaaagaaaagaagaacatctgaagttagctcagatgttttttaataaagaaaaatataatagttttgatcaactgcatttgttgcgccctgctctgcctgaaacaaaagtcgatccaactattctgggatcagaaatgtttggcaaaaatgtttctgcgcctttttttatcaatgctatgactggtggctcagctgcttctaaacaaattaatcaagcattgggacaggttgcccagcagcaaaatattgccctagctttgggatctgccagcattttagctaaggaaactgatcaactagacagttttatggttgccagagcagaagatccagatggtgtactaattgttaatgttaatccagaaacaccaatctctgcaattaaacaaattatccaagaattaaatgcagatgcgcttcagatccatttaaatacaatacaagaaattgccatgcctgaaggtgatcgtgactttcgttggcttgattcaattaaagcaattcgtaccgctatcgatttgcccattattattaaagaagtcggttttggattggatcaaacaagtattcatcttttaaaagtaaatggcattgaatacttcgatgtcgccggttcgggtggcacaaactttgcccagattgagaatgcacgtaatgccagtgacgtttcatacttagaagatttaggtttacctactgtggtgactgctctgatggcatggcaagagcaagttaaattttatgtttctggtggagtacgtaatcccctagatattttaaaaggtttagctctaggaggaaaatttgttggtatttcaaatgtttttttacaagaatacatccaaaatggtagtactggattagagcaattaattactaattggaaaaatgaattggctgctttaattgctgtttacggcaaaaaagatttagcatccctggtacaaataaaaaaatactataatttaccattaaaggctcaaatcgatcagttactgtaaagtaaaagcactagttaatgattactagtgcttttactttacataattttccttatttaatttcaagcaatttagcaatttctttttgaacagcactttcattacttgaaccaataatttgccctgcagcttgtttggcttctggcaacgccgttgcagtagcaaaactacggcctacatatttcagcattcctacatcattaccgctatcgccaaaagctatcatctcacttgatttgatccctaatttttgactcaaatatgctagacctactgccttattcattcccttagtttgcatatcaatcgagtctgctgcaccagaaacaaaaccaacctccggatatttttcttttaattcgcgcaaaattttagacattttatcttctggcactgtcagactgaccttgaaaatctgatcatcaatttctccaaaagaatctactacagtaatatgctccatgtattttttcatttcttgtttataagctcgtccactgctctttttaacataagcacttactagccccatcactacagctggatatggatattcagtagttatttttaataaagtttgatatatgtcatcacttaacgagtcaacatgcaaaatttgtcttccttgagcaactaatgccccattttcagctacaaaataaattttatccaaaacctcaggaaaacgagtcattaagttagcatattgattgccactagcaactacaaatttaatcccctgcttttgcatttccgcaaattcacgcaaaaataattctttatcatagtctttctggtcagttaaccaggttccgtccatatctgtcgcaattagttttatcattttctcaatccctttgggtaaaagttcttcaatacttgattaccagcgattttgccaaaactaaatattaatttttgatagctgactaacacaaagccccgcaaatcactgtccactttaacggtttcaccgtgcaaataattttggtattcttcaattgtcggtaaatcataaacccgttcttgctttaccttacctagcacttctgccaattgatgtcctggttcaaaacgttttttctttaatatacccaactcgactccattattaattacatgaagcttacttttttcaggcaaactgattgcaggaatatagacatgttcattacggacttttgctttattacgccagtcacttaaagcaactggtaaattaaactgatccattacctgaccaactagttcctgatcatttttggttaagcgccacggatcacgcttggcttttttgtttttgctctttttttcaattctagctttacctactttttgtaaaactgccacaaattgtccttcacctataccatcttgaggccaaaagcgtaatgttttagtcaaatcaggattcccatcagcccactcaggctgtccaacatcaatcttattagtttgtatccctgtatctaaaattgtaaaaccatattctttatttaaccagctaacaatctgctcatcctcttctggtgcaaaggtacaagttgaataaattaagcgtccgccaggttgaagcatcttaacagcttcattgaggatctctttttgacggttctggcatgttaaaacatagtcttgagaccaataatcaattgcctccggattttttctaaacattccttcaccactacatggagcatcgactaaaatcacatcaaaaaattccgaaaaaattggaactaacttttctggactttcattagtaattaaggcattactgatgccccaacgttcaatattttcccgtagtgcctttactcgtgttgcagagatttcattagctactaaaaggccctcacccttcaattgttctcctaatgctgttatttttcctccaggcgcagcacacagatctagcacgcgctctcctggccgaacaccactaattgccgcaggaaacatagccgctggatcttgagaataaacactaccgcttacccactcaggatcttcccccgatacttcaccataataggctgaatttatttgcggtactgaatcagtaagctcatatgaaaccttagtaggcttcaatgtattaattctaaaagcttttttgctctcttcattcatcgccgcaaatagttcttgtgcttttttggtacctaataatttttcatatttagttttaaattcatttggtagatttagcaattttcctgtcctttctcactaagtaatagaccatcccacaaaacgccaatacaattacaacccaggaagctattaatgtaactattaaagaaccatatgttgaataaaaggcatgccatcttaaaaagaagtatgtagcaagggcaaaaatagcctctattaaaaataaacgtacgctgcggttaattacccaattgcgcagcaaatcatcgtgtagacgtgttaaacgagcctgacgcttaattcctattgcaagcaacatatttgtgatcattccgaccaataggcaaacaactaacattaaaatatccggcacgacagataaacgatctcgatgatgctcttgaacaaaagacggaatatgcaaactagcatgataatgcttagcaatcttttcaatcactgcaggtgttgcatctactacaattcgataattcttgagctggtctttagcagttggctgatcaattcctgtacttagataatatttatccatttctacctgtggatagtccttaaattcgcctataacagaataataatttttgcctaaaataacatatttattattctgcacatctaataaattaagtttaactgttggccccagcaccacaaaagaaacctgtcctttaaaatcatcaggcgaaaaatagcgaccactctcagttggcaagccagtaacggcatgattagcccaaacaagcacttgttttttttcataattattatctagatgcagttgaatttgatgattcgcataatttttgtccaaatattttaggaaagtactaatcttatcatcactatctgttctaaaatagcgggtattattagttaagccgtgtgcttccagcaattcgtcagcataattagattcaatattggagagcattgttccaattcctaaaaaagataataaaagaatcagtaacaaaaatatctttttaaaattcattttttatttcaaatacctgttcattaataaaatcgaagctttgcaaggaatgattaatctcgtctaaagctgcactatttttaaaccaattttggtgccaaaattctggtgaattagtagcaccatctttttcaccaacaaagagcaaatgacaacttggattatacttatgcccagctgccacagtttctaaatctccgtgaccgaaatttggtgaccacgaacatagaactagattaactgtgtgatacttcttaattgcttggtcagctggtaaatcttctactggataaaaaggcttagctccagtggtcgacgtcttggcccactctaatgagtctgtactgtgaactttaattccaacctgagtcaaagcttgagaccaatacgcgttgcctgccatgatttctaacgctgtttgtacatgcagcttatttttaattaactgcgcagtctgaatattaggcagagaccagatgccatatattaaagagagatattgccgaaaattattaagtaaattatttaaatcccttaaggccccttctttatctggtcccacctcaactaaaacttcttcaaattcatctggcaataaacctaatctgcgtggtgcccgcttcaatggcttacctgcttgtacataactatcaattaatgctatttcttcaacttgtcgtttaaccgcagtatgatttatctcttgctctaattttgttaatttcgtcaaaaattttgtcatacttaaacaccttaatatgattttaccattcaacggcggagaattcagttataataagactagcaagcaaaggagatattctatggttgaaaccaaaaagagaaatgatgatgaaagcattggccgctttgttttagacataattattatgtttgcaattttgatgggaatttactactttatttttagttttttcctatcaaatgaaacagtatctggtccatcaatgcagcccacatttgagaatggcgatcgtttgattgctgtacgtcattttacgcctaaacgaaatgatatcgtcattctaaaagcaccagaccaaaaaggtgctctgtatatcaagcgaattattggtacacctggtgatatggttacttctaaaaatgataagctttacattaacggcaaacaaattgcagaaccatatttaaataatggctaccaaagaaagtcacataaattaggtgaactctatactaacaatttcactttaaaaaagcgagtacctaaggatagttacttcgtcatgggagatcaccgcgatgtttccaaagattcacgttacttcggttttgttaagcgcagcgcattagttggccgagtcgtcttcaggtattggccatttacgcaatggaaaacattttaatcaatgaaattgcaaaaaattttattttttattccaatttgattaaaattagagggtaaggagaaattattatgaatgagcaagaagaattatctgatgcaattatcaattttcaagtaaaacaccatgttaatgacactgacctagcctttgctagtcacctctcagttgaaaaagttcacgccatgaaagttggcgatggacaattcacagccgaagaagtaaatcagctttatgattacatgtcagcaaatgcttagttaactacaaaaaagagcttcatttcttgattgaaatgaagctctttttttgcattaattaatctatttttggttcaagatatttcttcacgaatactagattcaaaataccgaaaacaaggctaacaataaacaagcataaatcatctaaccagattggatcggttgcttgtaaatttggactcttatcaacaaagccctgtaacttagacataaagatcatgccgcagtaagctgcgacaattaccaaaattgcgataattaacaagcgagcccaaactgtactcttaaacggcaagaaatcagtaattactcgcgaactaaaattggcaaagctgacaaagaagtaaatgattaaaattatcaaaatgataaacaaccaatgaaaagcaagcattcgattgctagttatttcaacgccgggaactgttttaattggatacagaccaaactcacgaaatgcttgagcaaaactgtctgccccgcaactagggatcagcaacagactattaacgatttcttgcagcaagaagaaataaccacatgccagcaaactgctaaatatattagctaagtatgtttttcgttcatcgctagctgctaaatgccaggtttgactcagattaattttttcattttgccaacatgtaatcgcacaaaaggcaaaatcaatgtataaagtcacatagacaaaattattgcgccagaattgccctaaatttttagacggcagatttgctagaccattccaatttttgaaaagaagaaaataacctgataaaaatactacagcaaagatattaattaagaaaaccaaataaataaattttcttttttgcgtccacatttgcctaaacaaggtccaaaaattcgtcactatctacccctccccttcaattaacgattaattatcttaggttcgacaaatttactcattaagtagctgtcgattgctcctaaaacaattgctcctgcaaagtactcaaccactgaaatacccaatggatcatatgctgcttctttggcaaaacgatgcaaatacatagcagtaatttgttcgtttagctgttcagcaatcaagattgcaataatcacaatcactgccatcacaaataacttaatgacaatattattgttaactggcaattgatcaacaattactttcgtcaaaaaattagcaaaactgacaaaagtcataataactaaaaccgttccagttaagaacaatagaaattcaattaataaactagcatctgcccaagtaactttagcatcaactaagtcatgaagcagtgaataatgatgacttaaattatcaatcatagcagcaacgaagcctaaaatgacttgaattacaaaaatataaatacattcaactaaactagaaagcatattaatcagccagattttgacacttgaagctggagctagctgccaagtttgactgaggttgattttttcattttgccagcaaagcagaccaacaaaaatcacatcggcaatcggcgtttcgagcattcctgcactaagcaaacgatctagccaattactgtccttactaatgttgagataagctaaattgcttttatctaacagagccattaccagcaaaaaaaggactgcaaaaacttgtaataacaaaactaagttagcgtagcgccttttttgcacaaacatttgcttaaacaaggtcttaaaatttgccataaaaaactcctaattctgttttgcttctacgaatttattcaaaagcaagatatcgatcaaagtaatcacaacatcaaagaccaagaattgaagaatcgtagtggcatagttaatatcctggctgttgaccataaaaggactaaactttcctaagactgaaaagataattgttgccgcatggcctaaaatccaaataatcgcaataattacaattactctaataataaaggtccatactttacttgagccacctggcaaaaaatcaataatgctgcggcttgctaggttaagcaaacttacaattgcgtaccaagcatagccaataaaaatgattagcagcaaacttccgagcattgtttgccagtctcttgctgaaagatggatgctagcctgacctattgctttgcgcacatcttgatcagacaacatcggcaaaagggtaacgattatcgtgaccgcttctaaaattcctaaccaaatataagttaaaaatgctgtcccaaaattgctaagcaaaaacttagtatcagttaccggaatcaagcgccaagtttgactgcgattaattttttcattcttgattgaagaaataatccaataaacaaaatcagcgataaatgacgttatcagcatcattactgcaaatacagcgagaaaagcaacaatcacattgacagaactagtatcttttccattaacaaattctggtgtaccattttccgaaacaaaaccaataattgtaaaacataaactagcaaaggcttgaattaagaagattaaatagactgacttgcttttttcttgaaacattcgattaaacaatgtgttaaaactagtcattattcatcatcctcatctgcataaaaactttcatagtattcttcgattgacttatgcgtttgacgaatgtcatctgctgacttgtgttccaaaacggtatgatcttttacaataaccacttcatcaagcaatgatgaaatttcattgacaaagtgatctgagattaaaatcgttgccttttcatctttccacaaaatgatggaattaataattttctttcgagccattgcatcaatcccaccaaaaggttcatcaagtaaatacaaatctgctttacgagcaaatgttaaagcaataatcaatttttcacgcattcctcgtgataactgactcaacttcatttcaggatctaatttcataaacttacgcagctcatcgaattcattctcatcaaaatcttgaaaaatcgttgcgtaaaatttaaccacttccttgatctttgttgaatcgctgaagccagttaaaccatcagtaaaagacaacttagcctttctttctgcctcttttgttgccccctctaaattaatttcgcctttgtaattcttagctacaccggcaataattcgcatcaaagtggtcttaccagcaccattttcaccaagtaacgcaacaatcttgccaggagctaaattcaagttcacatcttgcaatacttgcttctgatttttcttataacttacatctttaatagctaataaatcattcattctgatccccaccattttttaaataattctctaacgttgaaactaactcgttctttcctattccaaactcttccatattttgaacaaactgttctaattcattattaattaatgactgcttggtttcggataatagtttagtatcttcagtaacaaaattaccttcgccacgtttagtataaagaataccttgactgttcatctgttgtagtgctctttgcacggtattaacattaacggttaattctagagcaagttttctaacagaaggaatcttctcaccagctgttaacttgcctaaagcaatttgacgatacaagtattgttcaatctgaagataaataggaatattatctttaaattccatttactcagctcctattttgcactgtattattaatctattacactaactataatacttactttagtcactttttgcaagggctaagtttaatcactttgtttcacaagttcataaaagttaaaagtacaacaaaaagatagtctataatcctataatgacggtaattataaactatcttttatttttaatagtattagtgcataatttttatttattaactatgtttaccctatttcctaatctatcaataatctcatattagatcagaaatagaattattgatatttttagtcaaaaatgtttcacttacttagctctttcagcatttaattcagccattttgatcatcacgtcaacagctttccacatagactcaagaactgtgtattcataacgaccatgcatgttttcttctccggcaaaaatattaggacatggtaagcccatataagtcaattgtgagccatctgtaccaccacgaaccgggtcttcattgacttcaagaccttctgctttataagcatcgcgcgctaagtcaacgatgtccatatgtttctttaattcatcggccatgttgtaatattggtcccacattttaagtgtaattcgttcagtaccgaattcatcattcattttcttaacgattgacttaaccaaattcttccgctcttcaagcccatcacgttcaaaatcacgaataatgtaatctaagtgagcattatcaacagtaccagcaaaattcattagatggaagaaaccttcgcgtccatcggtatgttctgggcgatcgtgttctggcagttgattatgaaagtcaattccaacttgaattgcattaatcatttgccccttagcaacagctgggtgaacattaactccctgaatatcaagactaaattgtgccgcagagaatgtaccccaatctaacttaccaggagcttcaccatcaacagtaaaagcaaagtcagcaccaaagtcttcaacatcaaagtgttcagcaccagtaccaatttcttcatcgggagtaaaggccaatcgaatcttaccatgcttaatttctggatgattcattaaatattccgcaaaagtcattaattctgacacaccacacttgtcatccccaccaagtaaggtatcacctgaggccgtaataattgtttgtcctttataattcttcaaatgtggaaaaactttaggatcaagataaaactctgaatctcctaattgaattttgctttcgccatcataattttcatgaatctgtggtttaacattttctgaattaaagtctgccgtatcactatgagctaaaaagcccattactggaacatcataatcaacatttgacggaatttcagcgattacactaccagcattttgattgtagtgaatgtcacttaaacctaattcttccaaatctttcataataacattcttttggaagttttcttctctttcagttgatggaaagcgatctgaatgttcgtcagaacgcgaattaactttaacgtactttaaaaatctaggtaacaaattaggatattccatatataactctctttctaattaaaataagtcttgaaatggattagtagaaacctcggaaagctcaattccaacattccagttattttcttcattccactttttaagtcgaccatagaccttgtacttaaatagtttttcagtataatgaccaggatcaacaacagttaaaccagatgaaatcatatcatggcctacatgataataaacatccccagtaataaaagcatctaaatggtcatctaaggctctagtccaatatttaccaccatccccacaaataaatcctacactggtaattggcttttcattgtttgcagtaatcagacgtgccattttaatttgcattttttctttaacataataggcaaaatcataagcagtcattgttctaggtaactttccttttctacccatagcaattccatcatcatccagacaaaatggttcaacatcttgcagacctagttcctctgcttgccaatcagcagatccatcttgggctttatctgaattagtatgaattgaataaacagtaattccattcttgataatattgccatacattgcgttttgtgcattcgcaaaatccaaattttgtgctggtctaaacattacaggatggtgactaacgatgaaatcaacccctttttcaacagcttcttcaactacctggggacgtacatctaaagtagtcattactttggtaacatcagcctccattgatccaatttgcataccaacaggatcaccttgtgaagcaatgttttccggaaaatcttgtcgcaaacgcgcaacaatgtcttttactttggtcatttctccaattcctccttgattaatttaatatcatgatctacttcattgattcgatcttcgtctttttttcttgctttattcaaattaaccaggaatctttgataataagcgagttggccttcccatttctgataaaaaactggattcttttcttgtacaataaaggggccaaaaaagatttccttttcagtcatctcatgcttttcttcagttaagctagccttaattaattcataagtatgcccagcctctgcaattaatttttctgagataatcttataattatgcatcatcagccaattacgtacccctgcttcgcctatattaggttctagtaccagagttttaaattgtgcatctttgctccaagctctatcaagaatatcagtcattaacttgccgcccattccggcaatcacaactgtatcaatctgatcagcatgagtaacggtttctaacccactacctaagcgagtttcaatttgctcggttaacccagctgctgcaatatcatttttagcattttcaagagggccctctgcaacgtcactagcaattgcataatcaattttgccattttttactaattcaattggcaagtatgcatgatcagttccaatatcagccactcgactgccaggatctaccatctttgccaacgtatttaatcttaaattcatgtttcctccataaaagatatggttaaccaaattttagcatatttcatagtcttattttgctactatttgatataatcgtcacagaaagcgggttttttacatgagtagaacagaaaatgtcacattaactaatatgtgcatggttaaaaacaaagatcaggttttagttcttgatcgcaacgatccggtctggccaggacttacttttcctggtggtcatgttgaagcgcatgaatcttttcatgattctgtcgtcagggaagtcaaagaagaaactggattaacgattagtcatcctcaattagttggtgttaaacaattttatgatcacaatgatgaacgttatttagtatttttctacatagctgaacaattttcgggtaccgttaaagaatcagacgaaggtaaactaacctggatgagtgctaaagaattgaaaaagcaaaagttagcttacaattttgatcatgatttaccagtattttttgaacaaacaattagtgaacatatgcttgacggaaagcgagatgagctattttaatgaaaaaaactgaaagtaagtttgcacttttagctgctttaattgctattttagcttttgcctctattcccttatggcaaaacaatctgaatagtttacgaccacaaactcacacggttaagaaaaagaagactgctaaaaagaaaaaagtcgttcatcttacttggggttacccttttaagaagctctatgaaaagaaaatcaaatttaaatctggacaaaagtttggtgaaactgacgtcattcgtcgagtctatcctagcaagagttattttcatgatggctatgacttcggatttagtgaagttggacattcttccgtatatgctgtgcatgcaggaactgtccatcgtgttaaatacgccccaggtttaggactttatatttggattatttccgatgatggctatgttgaagtttaccaggaaggcttcctcagtattactgatatttatgttaaaaaaggtcaaaaagtcaagttgggacaaaaaattggtaaactgaccggctctcacattcatttaggagttactaagacagataaagattacattgataaaaagcatgacaatacgccatgcaaatactattggaaagataatggcacttggttaaatccaatgaaaatcattgaagataatctaagggcagcaggtaaagatccagtccaataaaaaagagctaagtaaaacttagctcttttaatatagataattataattaatccatgaaatcacgtaattgatttgagcgacttggatgacgcaacttacgtaatgccttagcttcaatctgacgaatacgttctctggtaacaccaaataccttgcctacttcttccaaagtacgggtacgaccatcatcaagaccaaaacgcaaacgcaaaacattttcctcacgatcagttaaagtctcaagtacttgttcaagttgttccttcaacatttcgtaagaagcgtgttgttctggactagttgcatccttatcctcaataaagtcgcctaagtgtgaatcatcctcttcgccaataggtgtttctaatgaaacaggttcttgagcaatttttagaatatcacgtactttattggttggcatattcatttctgcaccaatttcttctggtgtaggttcacggcctaagtcctgtaacaattgacgttgtatcctgatcaatttattaattgtttcgaccatgtgaacaggaattctaattgtacgtgcttggtcagcgatcgcacgagtaattgcctgtctaatccaccaagttgcgtaggttgagaacttaaagcctagacgataatcaaacttatcaacagctttcattagtcccatattaccttcttgaatcaaatcaaggaatgacataccacgtcctacataacgcttagcaatagaaactaccaaacgaaggttggcttcggctaattcttgctttgcctcttcatccccggattcaattcttttggcaagagcaatttcttgatcagcagtaagaagtggtacacgaccaatttccttcaaatacatccgcactggatcgttcatgcgtacgcttgatggagcagacatatcctttaattcagccttttcaacatccttttgtttctttaaggctaactttgaaggatcaccgttttcatcaacaatgctaataccattatcttcaaactcttgtactagttgatctacagccttgccttgtaagttataaggcttaatcaaacgagcagtgaaatcttcttcagtgatcgacttatctttctttacgtcttttacgacttgcttaaccatcttatccaaagatagtttttgtgtagtttctttttctgccactaaaaagcctccttattaacctaagatccgttttaatccaataatctcctgagtgattgcaataattccttgtgcatcatttttgcgcttagcatcctgtaattgagcttgaagctcattcagcctggaatagatgttgcgtctttttaatgctagaaccaaagcatcaacttcttgaattgtagaatcttttggcatctgtgccatttcagcatctactattataccttgaagttgctcaggaataaaatctaagaacccatcaatttgtggattttcatgagtttccgcatattttaaccaatcctgtgccagagtttcaaaatcctgattaggaaaatgaaattgcccttctaacatatatttttgagcatcagttgaatgaataaataaatacaagagtctggtctgactaggatttttttcaactactgactgctctgtaggcacgtcttcatcaccaggtaaaggtacgtctatcggataatcaggtgaatttctttgagaattacgtacatgattgcgtgcccgattatttcgccgtctttctttagcaagatttgcctttaacgaagcaatagaaaccccactagacttcgccaatttttcagtatacatatcttgctcaactggattgcgcacttgtgcaatttcttttacggcctcacctaaataagcaatcttttcacggtcattatctaagttatatttttgttccaaccgttttaagaaaaagtcagtcggcgttaaggcacctttgacttcttccagatacttctcagcgccatattttttgacgtattcatcaggatctagtttttctggtaaaactacaattcctaaattaaaattgccatctttattaaacatacgtgcagcacgttcttcggcatggactcctggatcatctccatcataattaataatgatattaggagtaatacgtctcaacaaatatatttggtcatcagttaaactagttcccattgaggcaattcccgatttcacccctgctttatatgctgcaattacatccatataaccttcatatagaactaagtgaccttcaccacgagctgctttctttgcttctgcaaagtggaataatacctttgacttggtaaaaatccccgtttcaggactattcatatacttagcttcggtcttatcatcagaaattcgtctaccagaaaagcctatcgttctcccattttcattatccaatggaaacatcaaacggtcacgaaaacggtcgtataactgcccatccctagcttgaacaaataaaccactttgtgctagatcatcatcttgataacctttactacgtaaataagtaatcaaaacattatcagccttaggtgcatagcctatcttaaaatggtctaatatttcttgatctagttctcgcttttgagcatactgcatcccccgttcaccggctttagtagtcaaaagcacacgatgataaaaatcaacggcatcctgatgcatttgcataagtggatttaatttggtgccactattatgaccatatccattaggcatagcaatatgggcaaactcagctactcgctcgacgctttcgggaaaagttaaatcatccttatacatcaagaatttaaaaacatttccacccttaccacaaccaaagcacttaaaaaactgcttatcagcatttacagtaaacgacggagttttttcttgatgaaaagggcaaagaccaatatagtctttgccttttttctcaagcgaaacgtactgactgataacatcaacaatattgacgttactgcgaacctctgaaataaaatcttcaggaatccgtccagccatatgaatcaccctttttctatctaaattaactacttaataactaacttgcttaagtcacctaaacgatctgctaattcattaactgcatataattgtgctaatcggttattcttgaccttttcgtccttagccatgatcatattagtttcaaagtattgatcaatcactggttgcagttgaacaaaaccttggtagagatcagccaaactttcaatatcttgcaagttttgaacgccagcgtaaagttctttttcactgttatcatcaaagagactttcatcaacagcagtattactcttaaatttagccttctttaagatgttatcaattctagtcaaactctcaactactggcttgaattcttcatcatcatggtgaagttgcaatacagtagctgctgctaaaatttgacttggatcttgttgacttgaagcaagaacagcatcaataatatcatacttgaagtcattcttttgtaagtattgcttgacacgatcacgaatgaagtctgcaatttcctggtcagcatcactcttaggtagcttagctggagttacaccattaagcatactaatgatttctggtaaaacttcgttaaatggtaatgaccacttctcattaagtaagattcttacaataccatatgcataacgacgaagtgcgtatgggtcattagatgatgtaggaatcattcctgcaccaaagaaggttacaattgtatcaattttatcagcaattgataataatgaaccaaccgtagtttcaggaagtggaccttcagcagtggcaggcatgtagtgttccttgattgcaactgaaacttcttcgtcctcacctgcaagacgagcataatgcatgcccattacaccttgaagttctgcaaactcaccaaccatttgggtaactaagtcaaacttgtaaagttcactagcacggtcgaaatccttgactacattctctggtaaatcccaacgcttagctaagtaatcaccaatcatgcgaacacgttgcatcttttcagccattgaaccaatcttatcgtggaatgaaacattcttaagacgatcaacaaaatgactaagtggatacttgcggtcttcatcatagaagaattgagcatcgtccaaacgagcaactaaaactttttcattacctgaaataacattatcaaggtaatctttatttccgttacgaacagcaataaagtgattaattaacttaccagtttcatcatagacttcaaagtatctttgattgtctttcattgaagtaatcagcacttcatcaggaatcttcaaatacttttcatcaaatgaaccagcaaatacagtcggatattctactaaataagtaacttcttctagtaaatcacgatctggtttaacttgccagttgttcttcttaactaattcattcatttgacgaacgatcatatctttacgttcatctgcatcagcaattacaaattgatcttttaatgcatcttcatagtcatcagcattggccaaaacaactgaatcgcctaagaaacgatggccttgagttttacgacctgcagtaatatccaaaatcttaacgggaattacatcactgccaaataatgaaacaagccagtgaattggacgaacaaactcaaaatcatttgaatcccaacgcatcttagtagggaaagtcatcgccttaatgatatcgctcataccaagtaagatatcactagctttcttaccttccttttgaacgtgaacataagcgtattcagtacccttaagttcttcaaaatagatatcgtctgtagtcattccttggccacgagcaaatccttgagcagccttagtccaattaccatcttgatcttgagcaatcttcttagctggaccttttttaacttcatcaatatcgtcttgcttttcagccaaatcttcaaccaaaatagtcaaacgacgtggagttgaaaaagtcttaatatctttaaatttcaagccattttcttttaaaaattttcttgttctgtcagctaattgcttaacgctgcgtggtacaacgtgagctggcatttcttcagtaccaatttcaaataaataatctttagccattttctacccccgcctttttgtcttctgcacttttaagcaatgggaagccacgtttttcacgttcttcgacaaatttgacagcaacttcatgcgcaagatttctaattcttgataaataaccagcacgttcagtaactgaaacagcaccacgagcatcaagcaagttaaaagtatgtgaacacttcaaaatgtaatcatatgctgggtgaaccaagttcttatccaataaacgcttagcagttgcttcataaatatcaaagaattgaagcaattgttcttgatttgattcttcaaatgcatatttagaatgttcatattctggttgcttgaagatatcacgataaagaatgccattaccccattcaagatcaaatactgagttaacatcctgaatatatgacgcaaggcgttcaacaccgtaagtgatttcactcatagttggcttaacatctaattcaccaacaacttggaagtatgtgaattggctaacttccataccgtcaagccatacttcccaaccaacaccagcacaacccatagatgggttagcccagttatcttcaacgaaacgaatatcgtgttccaaaggatcgatacctaaaactttcaaactgtctaggtaatattgttgaatatccttaggagctggcttaataacaacttggaattggtggtgttggaataaccgattagggttttcaccataacgaccatctgcaggtcttctagaaggctctacataacaagctgcccatggttctggaccaactgcacgaagaaaagtgtaaggactcattgtacccgcacccttttcaacatcgtatgaaggcataatcatacaacctttggaggaccagaattgttccagcttaaagatcatattctgaatatttaatttcttatctgccatttcctttaatctcctcctgcgctaggccataaaaaaagcctatgcaaaattttgcatagggacgaaatattatcgcggttccaccctaattcaggaagtatccttcctgctcttaattgaacaatatgactagaggtgccttttcctagatgtcctcacaccgaccgacattcgctgaactagtacttttcttaaatcctcatcatcgtcaaatacgtttttattttaacacatgggtcatggtaaaaccagatttttactaactaaaaagttttaattcatctaaaaatttcttagtctttaaatttaggcctatcgtttcatggtaaatacgatcaatcgcttttctagtagccctcttcgtttcttcattaattttaatatcgcctaatcgctcaatcggtaataagccaattgttctaattacagcagtttcttttggctttaaatgcattcggctagtaactgtactaaaatgatcgctacaaataactccacccattttaatcgaataatcaaaaacgcctttttccttaccacaaataacacaatgctttagctgtggctcaacaccatatgctgctaatattttcatctgcacaatttgtgtaatcatttctgcatcaacgccactatctatttttttcaaagcaaataaagctaaatcataatatttaccaattggctgatattctacaaaggcgtgatcaattaaatcaaaaataaaagaaatataagcgttcttggttaaatcattatataagccatcaaactgccttgcccctttatatgtgcgtaaattacttaagcccttttcgctcgtataaattacgtaagtaccaatagaaaaatttaatgttgctgcacttaatcttgatttaggcctcagggctcctttaacaatcagagtcataatcccatcttgtttagtcataattttggctaataaatctgcttctttatatttctgccttttaaagataataccctgaacttcttttagttcacgtgccatatcatgactcctttagtatttaaaattcattttttatagatattctgatgaagatatcataatatcataaatagtctatagtacaaaaagactgctgtttcagcctccacatacgtggagaataccaagactttacccagaatcaacttcgaaactgggtttcagcctccacatacgtggagaatacagtaaacaaatcccaatataacaacaatcacaaaacaatagatcccaaaatttcatcactttgtcattactattgtatctatttttatcccattagttatccaacgaatagaattttcttgtctccctaaacatacaaaaaagacgtcatctttcgacaacgcttatacaacagtaattcaactaaagttcttttttgtcatagcctattcgctttaaaaagttagggtcagaacgccagttatgttggaccttaacccagagacgcaagttgaccttttcaccaagcaatctttcaatctcttgacgtgaattaatcccaatctgcttgagcatcttaccgcccttaccaataataatgcctttttgaccgtctttctcaacatagatagtcgcttcaatcaagagcttgccattttgatgagtattcatatgatcaactgcgacagcagtagcatgtggtacttcttgtgaagtcagtcgcagaatttgttcacgaattaactcggctaccacaaaatattcaggccgatctgtgatctgatcagcaccataatattgtgggcctactggcaaatattccttaatcgttttaagcagatcttcaatcccaattccttgagtagcagaaatcggtagtatttctttaaagccctcaagtttgtgatatgaatccataattggcaaaagcttattaggatgaatttcatcaactttattaattactaaaagaacaggaacttttacttcttttaacaagttggcaatgtattgatcgcccttacccatttcctcaggttcaaccatgaataaaactaaatcaacgtcattcaaactagatacactagccttatccatatagtcgtcaagttttgaatgaggcttaaaaatacctggcgtatctacaaaaacaacttgcatttcatctgaagtataaatacccgaaatgcgattacgagtcgtttgtggtttattagacgtaatggcaactttttgaccaactaaatagttcattaaagttgattttccaacattgggacgaccaactaaagcaacaaagccagacttaaactctttttcttccattatttacctctgccttcatctaattgatcaggatacaatggcaaaccataatcttctaacacttttccttgaataccaaacatttctttggcctcatccggcttaatgtggtcgtagccgtttaaatgtaaaaagccatggactattgtatatccaaattctcgatcaaaacctgtaccatactctttactgtgacgcttaatcacactaggacacataaatagatcaccgatatcctcttgaaagtctggatcatctgcaaatgctgcaagatcaattgaatcctcaccatcttcaattgcaaaggaaattacatcagtaggacggtctttgtcacgatactttaaattaatttcatgactacgatcttcgtcaacaaagttaatactcatctctaagttgttatctttgccaatttccttcttagctagcagcaaaagtttcataatccagtcttgccagttacgcttttcatcatctaaaaagccaacttcatcattataagtaatatcaattggatccatttttagtgtttaatgtcctctttttcataagcagtaataattttcgcaactacagggtgacgaacaacatcattagcagaaaagttgataaatttaatttggtcgatattcttcaagatatgtctagcatcaattaacccgctatgctgtcgaccaggtaaatcgacctgtgtcatatcaccgtttacgaccatcttagaattaaatccaagtctagttaaaaacatcttcatctgggcatctgtagtgttctgggcttcatcaagaattacaaaagcgtcatctaaagttcgtccacgcatataagcaagtggagcaacttcaattacgcctcgttccatcaaacggtcagtcgtattagtcccaagaatagcatacaaggagtcataaattggtctcaaatatggatcaactttttctttcaagtcaccaggtaaaaatccaagtgattcaccagcttcaacagctggcctagtcaaaatgattcgagaaacttctcccttcttaaaggcggcaattgcacaaactacggctaagaatgttttccccgttccagctggtcctattccaaagacaacatcagatttatcaatagcttcgacataacgcttttgtcccatattcttgactctgataggtctacctttagcatccctaatcaaaacctttttatataggtctgcaaagtactctgtggtacccttgtcagccatcttcatcgcacttactgtgtcgggcgcaccgatgttaacaccagtattcacaacactatcgagtgcctttagaacagcaactaccttcttgatcttctcttcatcgtctcctgcaatgacaatctcattaccgacatctgacacagaaagatcataaccttcagaaagaagctttaaatttccgtcattaactccaactagtttttgaatattttctggtctttgaggtgtaaaagttgtttgagccaaatagacccgctccttcttgttactactaatttagctgatcacgaactgattgcgaagcagccttgccatcggcacgtcccttaatctttggcattaaagctttcattaccttaccaaagtcggacttacctttagcaccaacttcatcaattgtttccttaacagctgctctaagttcatcctgattcatttgcttaggcatgtacttttctacaactgctaattcttttttggtttcttcagctaaatcatcacgattagccttaataaattcgtcaatcgattcttctctttgcttcttttcacgattaagaacagttaattcttcatctggagttaaatcgtgtcctgctttaattttttcattcattaaggccgatttgatcatccggacagtattaagagttgtcttgtcgtgattcttcatagctgatttcatatcagccatgatttgatctgacaaactcatttaatatccttctttctattaaaaacccaatagtattataacaaactatgttcttaactaaaataaaactaacaaatatttacttaacataatcaaaattatgcttcaagaagtcaaaaagaaaagctacccaaaaacaggtagctttctcagtagtttattaataatgtctacgcttacgtgcagcttcagacttcaactttctacgaacactaggtttttcgtagaattcgcgcttgcggtattcttgtaaggtaccacttcttgaaacggaacgcttgaaacgacgaagagcatcatcaatagactcgttttcgtgaacgattgtcttagccatgtgtgatccctccttccatttcttggcgttacgccatacatttacttaaattataccaaactaatctttagggtcaatacaattcaaaaactttttgataaatttttaagttaagtaaaccgactactttaccttaataaaagagctgagtttttattgttaatccgctttcattaatagtataattattttcagaaagatatttaataatacacgaggagcttaatatggtagaaacaaaagaccaaaatgaattaaacattattattatttctgatgcggctggtgacactgcttttagtaacgccacagctgcagctgcagaatttcctaactgcaatatcaactatcgtcgttacccctttatcactaaccaaaagaagttggacgaagttttaacagaaattgaaaaatatccaaacttggtaattatctacagtttggttaaagatgaaatgcaaatgccagttatcaaatttgcccgtgagcataatgttgaatgtgttgacatcttctcacctgtagttgaagcaattcaacaaactactcatatgacaccagatcaaaaaattggtgcacagcatagcttaaatcaaaagtactttgacagaatttccgcaatggaattcgctgtaatgtatgatgatggtaaagatccaaaaggtttcttggaagctgacgttgttttacttggggtatcaagaacttctaagactccactttctttgttcttagccaataagaacttaaaggtagctaatttaccacttgttcctgaaactcacattccaaaagaaatctacgaaattgatcctaagaagattattggcttgactaacgatccatctgtattgaacgaaatcagacgtcaaagaatgatcgcttatggtttgaatcctgatactacttattctaatatggattcaatcaacaaggagcttgaatcagcacaagcactttataagaaattaggttgctatgtaattaatgttgctcaccgctccattgaagaaactgccgcacttattttggagcacttgggtattgatgattacgctaagtaataatagatactaagatcaagtatgtccaaaaatcgttctagagtttctctagagcgatttttatttacagaaaaatatttgtaaatttatgcatattactgttctgactcccatgatctaacaatcatctaaaacagaaaacaggtattccaggcgcgatagtgggatctaaacctcattgatctaacaatcatctaaaactacctcacacctctattatttatttctttagatctaaacctcattgatctaaaaccgtacgttggtaccgccgcaaaagctaatagatctaaacctcattgatctaacaaccatctaaaacgtcttacgcatgtaaacgccgttttcacgggatctaaacctcattgatctaacaatcatctaaaacccgcgttaatgttgatttttctaaattcgagatctaaacctcattgatctaacaatcatctaaaacgttcctagcagggacaagattcaagtgcttgatctaaacctcattgatctaacaatcatctaaaacacgtaagcaccttttgaattggagactactgatctaaacctcattgatctaacaatcatctaaaaccgatatttcataatatctttttaatcaattgtctaataccaatcaacaagatctcgatcaatatatgcaacttgagcatccttgactgctaccccatatttcttatctgtgaattcaattaaaataattttcaatttaagttgtctaacaatcttactaagttcttttaactgtgtttcatcaaggtaatgagctacattacaaaacacgggaatactatcaagattatattcttgatgaatcttaagaactgtttcaattatagcatatggtgttaacatgaaactgtcaaatcttttgtgtaaatagatctttctcgtaaattgattttttaattatttatttaatcaaagtaggattctaaggtgtcctgaacctgaccaaagcctttatgaattcgattgaaataacggtcattgtagctcattgcctgaatgccaataaaagcatcaagcgactgttcagttggaaactctgccttaggcttagctttgcgcttgatcacattgttaaatgattcaatcatgttagtcgaataaattgaagctctgatctgcttgggatagttataaaagaccagcagatctggttctatgtctttcaagcttctgataacatggctgtaaaccttgccccatttggtatagaagtcatgcaggacagctgtggcttcttctttgtttgtctgttgatgcacctgtttgaattcgttcatgatcttttcacgatcgtcgacgcgtactttagcacagatattgcgcatgacatgaaccaagcagcgttgaaaatgagctttaggataagtcctggtcaaggccgctttcatgccaacaacaccatcagaaagaaagagctcaacttgcttcaagcctctggacttcatgttttgaagcatctctgtccagacttcaatgttctcactaggcgcaatgcagtagtcaatgacttctttatgtccattaggtttaatgccaatggcaatatagactgcttcacgctcaaacgtttctcggcgcaaaggaaggtatgtcgcatccaaatagacacagaaaaacttgtcgcttagcttgcgcttgtgataagcctcaaccttggggagcatctgcttggaaatatttgatacttgggctggactataatgactgccatacattttctcaatcaagtcagcgatttctctggtagttacgcctttggagtagagcttgataatcgtgctttccaaaacatcagagtgctgcttgtagtcaggcagcgtgtgctgatgaaactggccgttgcgatctcgaggcacttgcacttcaattggtccaaactgggtatcaaccttgcggaaataagcaccatttctagaattgccagtattccagccatttctggcatagggatcatagcccagaaaggcagtcaattcagcttctagcaagttattaacagcctgttgtagctctttgcgcaataaatcgtttattttgtctggattgaatagagcttgtgctatatttttggtaaaatcattcatgaaggagttcttctttctgtatgtgtttttttgttcaaaccaatcatacgagaaaggaactcctttttctaatgtttaaagaaataaatttaaggaattattcatccttacacaaactattttacagtctcgttaacattaattgagcatctaaatgaatgttaaccattttcaacagctttttaatatcttcgctaaaatcaatttctaaaggtaaatcttccaaaagcaaagaatcattcaatactgtttctaatgaataaaaagattttaaaattctatttctgtttacctcatccaagttagaaataaagttcttaataatgacattcatatactttgccataatattgtcatttaacaacggggctcctacaaaatcaaaactcttactaatagacttattgttgtattcgtcatcagaacatactattagatcatttaaggcttgaaaacctaaaaccagatctttataggcaatgggactttgagtgcaaataacattaattccatcttttaaacagattttcttatgtgacaaataggaaacaatcatagtatcactgtcctgtctgaagtattgcgaatatcttttactgcatccccaaccaagaaatgcatatcactgtactgtttttccgtaaccattagactttgcacaacacctttgctaggcataaattttcttattctcttttctaaaaaattagctgtttgtctagtgacacatactctttcatacaccgaaaactgaatcattaaaaatccttcatttattagagcttttctaaattgtcgatattcttttctttcagcggcagtgtccgtaggcaaatcaaacattatcattaatcgcatcattcggtacctcattacacaaactcatctctattctaatatcatctgtttctccacttaaatatctaaggcagcttcttacatatacagaaattgcattcgttaaaattgtattcctaccattgaattttatttgtaagctaagcaactcaactaatccatacttaatatctggtgtaaaactggtaatattttcgtgtgccttaacccaataatcaactatggatctaaatggttccattaaatcacaagctaaattaaattgattttccactgaatgatgatgtattcccagataagtcaaatatccattcattgcaatttctctatcgaaggatgaaagcaatattgagtatccataatctagtgctgcattaatcactccggaatttcttctaataaagtccttaccaaataacttcatgaaatattttctagcagccgctgcttctctattggataaatcgttcacctctaacttgtacagctcttgctcaacttcagtttcatcaattcgataattttttaacaccgatatttgattttttagcttagcagctacaattttggtccataaattttttttcttctttcattccattcaaattgcattttcaacttctttatgtccctagccccaggataataattcactgtctctgtaacaggttgatatttatcatcaacaaagattaccttgcattgatttttggctaacttacttatcaaagcactagtaatcacagcctgtgatgttgaaattaaaaccaaattgatatcttcaataggtatttgattaataccatcttttgtttggactataagcatattcatagagtatgttagctttgcatgctgagttattattacgttacgccatcccattttttctccttgtacatctatatctataatgatattatttatttgttgggtagctcccaactcttaaccttattgatctaacaatcataatttaaaatcaagcaatgcgttttagtacgcagagtttcaacacttgtcccgagctatcgagggactttttttatgtaaaaatgaggaaccacatgtcggttcctcatttatttttataaactagaaatcttaacgcgtttttcaaacaaaccagtaggtgattgataaactaaaatagtgtccgaagataatgtaattccagaattattttgaagttgaccaaatggtacagttataccaatatctttaagttcacctgtatcagaattatcatgcaaacccttcaaaatttgaataatagctttaaacttatcctcagcgtttaatttcaagaatttttctctacccttatgtaatttatttctaaaatctctaatgtcaaacaaaggtaaatatctatcaatcttttctaaaatttcatcgtaaacatccaaaagttcttgatcttgcttatcagaatctagccaatgaccagtaattactctcattgcctcttctgataaaaccaactgttttgcattacataaataaatagcactctttaacaaaaattttttattgccatcttgcacaacctggttatatggaactttacctttaataatatcaaatgatattactcctgcttttcgttttcccttatcgttgtataaaatacttggtgataaaatttgctttagaatcttttcatagttaccttctttttcagctttatttaaaatagcacgcttcgtcataggtacagcaattactttgtactgtgaagatttagtcttattaattcttacaattgccatataggctgctgcagtaccagtatagccaccataaatatctgttgaaaatcctttacgtttttcaattaatttacgactcttcgctatatcccgttcagcccgaggatatatagtcattccaaacatctcttgattctttgttgtcgtatctctagatacaagcatatatttgtaattatatgccttattaagttgcaatcgaattttattcttttcaaataaaactttcccctgttgagatctgatctcatttggtgctttactacccaaaagtttggcaacaaagtcaaaatttttggtcttttttaaaatttcattttctttttttaggatcagaactaaactttttaaattgaccataaacaaagaatggccgtaatttaggatacgcttgatacagtagattcccacaaatagtagttaaatatgcatcaattgcatggtgataatcattaacctctcgacttttatacaaatcaaactcattacgtaaatagtgattagaactagccttgacaactattattttagtctttggatactcagcttgaagaattgtagttgctaattttatgatttgacttgtctcaactaattgtttacgaataaaacctgaagcttgatgtttattaatattctctggatctaggaataaattattttgttttgctttattaatcagtcctttatcagcccagttattccacatctgcttaaccgttatccctaaaccagtagctagattatcaccaaagagttttaaaggaactccatctgacttaccattgtttattggtttagcaaccaacacacgattattcagggaatcatctttaataaaactttgaggcaagatatggtctatgtcataatactgagatacttcatcaatattaattggcttaccagtataagcatctcttccaagttgcatgaagtgtctgggaaaaaactaagtctcagatcatgaaaaaagaacgttgaatttttgtttcaacgctctttttgtatacttttagctccagccttgatattattaaatcatcacaaaataaaaaaaaaaggtggaaactaacatgtacaaaaattatatcacaggtcaaactgctttaacacttaatctagattttgccattccggccaatcatttggctaatgtcatcagctggtttgtagattcaattccagaagatgttttagtaggcaagactgctaaaacgggccgcccagcctatcatccagccatgatgctcaaaatactgctttttgcttactccagaagagttttttctggcagaaagattgagttgatgctggaagaaaatctgccaatgatgatcttggctgaccagcaaaagatttcatatcatactatcaataattttagatcaagcagccatgccaatgaactgattaaaaagagctttatctacttcactaacctgttagaagatgaaggcttaatcaatgaaggtgctgcttttatcgatggtactaagattgaagctgatgctaaccgctatacatttgtctggcgcaaagcggttgaaaagtatcatgaaaagctgaaaggccaggcagttgaactttatgatgaattgattactaaagaagtagtcaaagaaatggaaaaagaaaaagttcaaactagtcaggggctaaaggaattagctcaagaaactgaagcagaaattaacaagctgactaaagagattgagcaggaaaacaaagccattcctggcggttcacctcgaaaagccaagcgacgtggactaaaaaagattctgcaccggctaagaaaagattatgtgccaagaatgcaaaaatatgaagaagccgaagagatctttgccggacgcaacagttattccaaaacagatcatgacgccacctttatgcatatgaaggaagaccacatgaaaaatggtcaattaaagcctggctacaatattcaagcagtcacgaccgatcaatatgtagttgattatgccatctttcctaatccgacagatttcaaaactttggagccggttttggatcaaatgaccgtgttggacaagtttgacaaaatcgtcgccgatgctggctatggcagtgaatacaattattcgatgctggaggaaaaatatccagacaagaagtactttattccctacactatgtatgaaaaagaacagaccaaaaagtataagaatgatccaactaagctaatcaactggtactacaatgaaaaagatgattattacattgatcatcatggcgtcagattcaatttcaaatattacagccagcgcaaggatcgttctactggtcaggtccgtgattttaaggtttatgaggcagacgagttccagctaacgccagaattggaacaattggctaaaacagctagcggccgccagcgccaagttcgctataatcctaactggcaatatttaaaagaaaaagcaaaagaagttctccaaagcgaagaaggcagacacatctatggcatgagaaaatatgatgtagagccagttttcggacatttgaagaacgtatttggcatgcgcagaacgcacctgcgaggtaaagagaaggtcgaaaccgatatcggaattgcctttatgatgatgaatttgaacaaatattgtcaaagaaggtggctgaagggccgatttttattgttaaaaattttaaagagaacaaaaaaacgatcaagattcttaaaaaaggaaatcttgatcgtttttattcatctggaagctatttttttcccagacacttaattgattattcttgatatattcagccagcttatccttcaaatttttatttactatatctcctgatattttttggtaaatatcctgtagcttatgccctcgtgtttgtgataacttagaatttcttctactttcacgtgcaaattcaatagctatttgtttaggtgcttgaccagaagcagctttttgaatgtcatgaacaacttttacaacctgcctaatcattttcttatttgcaggagaagtatacgcttctgataaaatatcttccatactatttgaatgcatgagatcttgatttgcatctgtaattgtgccttttatatctgctttatttactatactcatgaaaatttgttggctattccacaactgctcaataatattttgaccatttgaatctacaatagcagttaacaattttttagataatctgccccaaccctgaagtctaatattttgtaggaattgaatttgttttgctgtaagccaatcaattgtttgaagcttttgtatataaatctgcttatcttcaaaaatagttgaccattcaataattttttcaaaatcatcacgaaattcatttgagtcaagtttatcaacaaataaacctgacttttttaatttaatgtatgtagataaactagaattaaatttagtttgatcagctaaccccttaattttgatataaggcaatttctgattttctattaaccaatttttaagctgcttagctgagacagtattattctttttgaataagtcctcataaagttcttgctttacgctaacagataatttcttcccattcacactaattttatttaattcatccaaaacagtatatttttgatataaaagactatttgctggaagaacatcttcaccaaacaaataagtatcttttgttgtaagtcgtttaataaagttatttgcagacttttgtctatcaactttttcatcaaaattccaaggcgtaattcgacctttagcttttctaaccatccaagcaaaagattgattttgtcgagtttgaggataagatgaatttgttggttcaatcattggaccaacatagtatggcaccctaaaacgaatcagttcatcaagcttataaggtgcctgcatacgatgagctttaattggattaatctcttttaaaaatggataatattttccctgattttcaattatcttatctagctcgatttgattaagctggaagggaattacgccgttttcatcgcttcgttgcttaggcataaacttatctaacgctatttcttttctaatttgaactgcctcttttgatgcatccaaattctttttaactatttcataaaaatcgctttttcgataaaggtgcttgttgggaaaggcttttttagtttcaacatcaacaaaatgacggttattgacatatttgtcgtaagccaactgtaaattgtgagcttttttcctgtctgaatggttcttgattactgtttttagcaatttcaaatcttgggcatgatcgttatattttcttatcatagattccgataaagttgaaccttcatcgacaatattcagtagagaaattgcactaaataagtttctaactaaatccaatatctgtaactgagtatcagttaaatcagaagtaatttcactcaaatttacatccgcattttcatcatttaatttaaaattccaaattgagctgtcagtcttgtctacatttacttgtaaaataatttcaaattttgctttgtatcctaaaattgctttgctaatttcttttgaaatttttttacttagttttagaccagacttattttcagtgtcgggtaacacatcagcaatttcttttatcttatccagtttaaacatttgttcatttcgaataatgtcttcaacttttgaagcatttcctgcatcaaaaatcactccactttctggcagaaatatggaataaagatcgtttagttcatttacaaacctatcgatttcaatctttgacgcactaaaattacttatggatgaattagacaaaaaatttcctcgatatttcacgatatgatgaatggcaatataaatagcccgaagatcaaacttcttatcctgtttcattaaagcgtttcttaaatgataaatagttggaaattttttataaaattgtttatccatttttttagttggaaagacaattgaagacacatttttccttgtgtccaatggagaaagtcctgactcttttaaacgagcaaagaaatttggatctacctttgccatttcttcatcaaaaatttcttccaacaatttaagacgccattttcttcgctttatacgcctcctagtagttctaaaagctcgtctatcagcagctgatacgccttcatcaaacaagtgcgagccaagtgctctttttccatgcatttttaatatattattatcaaaatcagtagcaacccacccacatgaattagtaccaatatctagaccaaccatatattcattatttaacttcgtcattattattctctactttcattgtccaaatgagactgtaaaatagtttgtgtaaggatgaatgattccttaaatttatttctttaaacattagaaaaaggagttcctttctcgtatgattggtttgaacaaaaaacacatacagaaagaagaactccttcatgaatgattttaccaaagattttgctcaagctctattcaatccagacaaaataaatgatttattgcgcaaagagctacaacaggctgttaataacttgttagaagctgaattgactgcctttctgggctatgatccctatgccagaaatggctggaatactggcaactctagaaatggtgcttatttccgcaaagttgatacgcaatttggcccaattgaagtgcaagtgcctcgggatcgcaacggtcaatttcatcagcacacgctgcctgactacaagcagcactctgatgttttggaaagcacgattatcaagctatactccaaaggcgtaactaccagagaaatcgctgacttgattgagaaaatgtatggcagtcattatagtccagctcaagtatcaaatatttccaagcagatgctccccaagattgaggcttatcacaagcgcaagctaagcgacaagtttttctgcgtctatttggatgcgacataccttcctttgcgccgagaaacatttgagcgtgaagcagtctatattgccattggcatcaagcctaatgggcacaaggaggtcattgactactgcattgcacctagcgagaacattgaagtctggacagatatgcttcaaaacatgaaatcccgaggcttaaagcaagttgagctttttctttctgatggtgttgttggcatgaaaacagccttggccaggacttatcctaaagctcattttcaacgctgtttggttcatgtcatgcgcaatatctgcgctaaagtacgcgtcgacgatcgtgaaaagatcatgaacgaattcaaacaggtgcatcaacagacaaacaaagaagaagccacagctgtcctgcatgacttctataccaaatggggcaaggtttacagccatgttatcagaagcttgaaagacatagaaccagatctgctggtcttttataactatcccaagcagatcagagcttcaatttattcgactaacatgattgaatcatttaacaatgtgatcaagcgcaaagctaagcctaaggcagagtttccaactgaacagtcgcttgatgcttttattggcattcaggcaatgagctacaatgaccgttatttcaatcgaattcataaaggctttggtcaggttcaggacaccttagaatcctactttgattaaataaataattaaaaaatcaatttacgagaaagatctatttacacaaaagatttgacagtttcgtccaaattattatttttgagcccaattaatgtctactatcatttactaaattcaatgtaaacgttattaatttaattctatgtaaatcccaaaataaagtaaagaaatttcaaaaatacctagactcgtaattaaaaacatattcacatatactcatactaactttttgttattaatcgaaatttaattgtaactttctcgtaaaactgctgagctacaatagtttaggtgaattaagagaggagataaaaatcagaacttatctggtttctttttataatgaaatttcgtaaattaataatttctttgttaggtactgcattattaacttcaagcgttggtttatcaaccaccactgcttctgctgatacgcttgatgactcacaaaatacaactgaagttcaacccaagaacctcaagtgggcttatccgtttaaagccaacaagaaaaatggtgttcgtccaatgtataatgcacaaacttttggcataactaactatatgcgttctactacaccaccttcctactttcatgatggttgggattttggtttttcagaagttgggcattctaacgtatatgcaattcatcaaggtactgttaaaaaggttgcttatggcaacggccttggctggttcatctgggttattagtcctgataattacgttgaagtttaccaagaagggtttaataagaaaaaagacatttatgttaagactggtcaaaagattaaattagatcaaaagatcggtaagctaactggctcacacttacaccttggcgttactcaaacaaataaagattacataaacaaatatggttttccatgtaagaattggaacgttaacaacggaacttggctcaatccaatcgaggttatcaaaagcaacttaaagaaatagttaacataatctaaaatattgaaagtaaaaaagcaggtcacagcttataacagttatgatctgctttttattaatcccaatgttccttgataaacttagctcttccaccagcttcttccattgcatatctaagtggatcttttttataaaaatcttggtgatattcctcagctggataaaatggcttagctggttcaattttagttacgattggtttatcaaatttaccactagcttgtaatctttgcttagatttttcagctgcttctttttgagcaggtgaattataaaaaattacaggtcgataattatcaccacgatcttggaattgccccattgcatctgtgggatcagtcacttgccaataatagtttagcaattgatcatacgatatttttgctggatcaaaggtaatctcaacagcttcagtatggccagtcgtacctgaacagacttgctcatatgttggattagcaacatgaccaccagtataaccagaaactactttttctactccgtcaactgtatcgaaaggttcgaccatgcaccaaaaacaaccgccagcgaagattgctgtgtcgttgttgggttttgccttggtatcagtggttttggcttgtttattattctctgtcattctttgaaatacctccattttatttgaattttattgcttttttaagttaactagtattatatacaaataaaaatgagatgcactttttattacctgatgtatcccattttatttctttacaaattattgcgtctttcttcaatatccttttcaatctgttctaaatcatcttcgatagcaagatttaaaataaagtttttcgtcgttgacctcttattaatgtaaagcttacgggcctcatttttatcattccactttttatttacttctgtatatttagccattaaaaatcactttccataatgctatagcaatcacaatcaaaacaccagttaacaaagctcttttaggatagaactttaatgaccatttagtatttttgccagtatgagttaattttataggctttcggcatatttgtcacctcttagctccgattctcttagcctcctttcactatatacaacacacgcttttacgtgtaacgcgaatgatatttagaaaaatatgccaaaaagggcatcaatctggccgtctaaagccaaatgatgctttaattgttttttcaccaaaatcaatagcctaacttaatgacactgtttttacataaacttattaaatttataattcttcatattttttgctctttaattaatttgttatcaaaattgaatacaacgattagtagctaagtccttcttacgattaccagattaccaattcatctcgattctattttagatttcttagcatcttttcactatataagtgaacgcaatctccgtgcaccatcaacaatatttttaaataatatacaaaaacagtcactctatagaacatatttttcagagcagctatttagcctccacatgtgtggagaatacttaagcctcatcttttggctgatgtaacgacttggatcacctccacatgtgtggagaatactaaacggctgtggcgttgacacagctcaaagtaggatcacctccacacacgtggagaatacgctaactggataccagtcatcaccgttaacagtaggatcacctccacatgtgtggagaatactctgccttgtctcccgtgcccttcaagatgataggatcacctccacactcgtggagaatacactaaatgatccacgatatatcaacatccctcaatcgaaataatatcatttttaatcacttttaacaaagaccaataataaagccataattacaaaaagccactccaaataaaaaagaagcatttctgcttctttttgaatagttttgctcccaaagtgcccctaggattcaaatttcatttataaatccttatatatcaaggtttaagggctatccattaaacgatttcttgctccttgaagcgaccatatactttttcaacttcactaacactcatgaaagcatacggatctgctccttgcacgatttggcgaatatcatacatatcatatcgatcaataatggtaatcaaaactgtcttttcaatatgactgtatgcaccttcagcatcatgcaaaatggtaattcctctatgcatccggttttgaataccatcgataatatgctgtgggtgctgagtaacaatcattacttgcatcttctggtgttgggtataaaccgcatcaattactcgcccattaataaaaatagtcaaggcggaataaagagcacgtggccaaccaaacatgtatcccgcagcagcgataataatcaaattaataaaaatattaaattttccgtaactaatgcccgttttttgcctaattacaataccaataatgtcgagtccaccagttgaaataccgttctttaatgccatcccagttccaataccgttgatcgaagcaccaaaaatcgcacaaaccagtgggtccaggtgcatctgccaaggttgaatagcgtgcatcatgatagaacctagaacaacagcaacgatggtgaagaaagtaaatttatgtcctatcttgaaccaagccaatataaataaaggaaagttcaaaagaaagtacatcattgatgttgataatgtaaacggtagatatctttcacttacagtattaattaattgcgcaaaacccgtgattcctgacgagtacatatgccccggcgtccaaaaaaagttcaaggcaactgcaaccgcaattgaataaaagaaggcagctgacaattttgaaagaaaattgtagcgtcggttgaacttatcaagttgatccatagtttgtcaaatcctttgagcaaatactaatagtaaacacattaattttaacaaaagttttgctgctgaccaatctaaatagacatttttatcacttttgttaatcggagcaaaaaatgatactattcagttaatattaattagtctatccaaatagaaaggtgtctttcatgagttcttactatgaattaatgtggcgtgacgatgaactaacttcttataccactgacaagctgaattttatctacaacgcaatcgatcatcccttgtctgtccgctatagacagttatatcctaatcgattagactggcaaaaagccgtaaacagacacaatgcagctattcaaaaagtcaaagaccttcttattgaaagaaaagatagtcataatatacgtgaagcttggtttaaactggatcccaatgcacgaactaaagcaaacaatggttttactgttgaacaactagctaataagttcccttacatggcaaaacaacttggtgcctttatggaaattgaaaacatcgaaatcaaatactttgatggagaatttaagcctagatatgacttagatgatttttctgatattttttctgccaattatcccactagtggctttaaacaaagtggcattactcaagaagctttactgaagctctaccctaacatcagtgctaaaaatttagaccaaattttaaaaatggccgactgtgaattagagcaagaaaatggcactgaagttattccttattggtatgctgtcaatgctaaaagaatgctaatcgatggtgatagttttgctgcaacctttgacgactaaaaaactgaccgcttggtcagtctttttattggataatttgaacaccgtgttcatcaggatgtaagattaatgtctcatcttttaaatcatgtttacgtaagcccgacaaaaatccagctacatgtttatcttcaatccacgtcataatcgttgaacctgcgccgctcaaataagttgccaaggcatgttttgaatgagctacctcccgcacttttacaagttctggcactagtttttctcggtaaacttcatggaatacatcttgttccattaattctcctgctttagggtagtcttgagcaaacaaactagcaattaaagtattagcaactgctgagccatgcgtagctacgccaaaagctaattctttaggcaaaactgctctagctgtcttagtttccaaattataatcgggtacataagccaccaacgcatatggaggaagtggtgcttcaactgcatcaaaatgatggttaacttcagcaccaacaaccaagccgcccaaaatagtcggtgcaatattatcaggatgtccctcgattttagctcctaattgaaccttttcttcatctgatagtcccagcttaccaatttgattagccaattcaattccggctgcgatagcacttgaactgctacctaaaccatgagccaatgggatattgcttttaacgcgtaaatgaagcggtggtaaccctggataaactgttagtgcagtcttaacaattaaatttttttcatcatgtggaattcctttcatcacatgatccacctgaaagcgatcggctaagcttaaaacttctacttccaaataaagtgaaacagccatgccaagtgaatcaaagccaggacccaagtttgccgttgaagctggtgctttaataatcattttttcccttcctttactgcaaaatcttatagctagcttttaaatattgatcttgaatcgctaaatcttgtagctgctgtcgactaatattttcggttacaactacaattcttgattgtacttgtttaatctcacgaaccggaatttccaaatcagagagtaatttactcaaatcaaacaaggtctcttctgcttcgaaagataaataataggaatacttcacatcctccgaacttgttaattgcataacatgggagaaattactaaatggctgaccggtggtctttttcactacgttttttatttcagtaatcacatcactcatgactgaattagccgttgcagagctacccgcacctgggcctgtgaatactgctgttcctaggctttggctcttaatttgtaaagcatttagttcatttttaatatgcgccataatcgcattttctggcaacaaacatggagcaacttctacaaataatttaccattaatatttttggcaatcccaatcagcttaatgacatagcctaacttctgagcctgtttaatgtcaaaatcctttagattattaatcccttgaatagtaaaatcatcaatactaatcttagtaccaaaagcaaacttgcttaaaattacaatcttgtatgctgcatccttacctgtaacatcgttagtgggatcagcctccgcaaagcccagctcttgagcatttttcagcgcttcctcgtagcttagtcccttttcccccatttgtgacaaaatataattcgtcgtaccattaataattccttgaatttcggaaataatgtcactggaataagaggtagccaaggtccgcaaaatagggatcccacctgcaacgctagcatcatacattaaatcacactttttacttgcagctaaattaatcaattctgaaccaaaagttgccattaagtctttattggccgtaactacattttttccagcattgattgctgcagtaatatattccttagcaggatgaagcccacctattaattcaactataattttaatttcgggatcttgcaaaatcgaatcgaaatctgtagttagcatcacttcgttagctaaattacgatgtttttctggattacgtactagagctttttcaatgatgatttcttcaccacttgtttgtctaatcttctttttattatttttaattatttttaaaacacctgaaccaactgttcctaatccaagcaatgcaattttgatggccatttgatcttatcctctttttaatgattttcttatttttacgattgtatcataggtgctaatcaaggtacaatagttataatattaatatttcataagataggaagattgtttatgcaatatcgtagtactagaggttcaaaagaaaacactttaactgcacctcaagcaattattcaaggcttggctcaagacggtgggctttacgtgcctgttgcctttcctcaagctaattttaagttagaagatttatccaaactttcctacaagcaaatcgctgccatggttattagcttattctttgatgactttactaaggagcaaatcaccactgcagttcaaagcgcttatagtgaacaatgggatgatcgcagcattgttccaatcgaaaagcacgataaccatttttacatggagctttttcacggtcctacccttgccttcaaagatatagctttgcaaatgttgccacaattaatgaccagagctgttcaaattgaaaagattgataaagatattattattttaaccgctacttctggcgatactggtacggcatcaatgcgtggctttgctaatcaaaagggtaccgatgtcatagtcttttatcctgaaggtggcgttagtcctgttcaacttaagcaaatgctcagccaacgcggcaacaatttgcgtgcaattgcaatcaaaggtaactttgacgatgctcaaactgaagttaaaaaaatcttcaacaatgattctttcaaaaaccgacttaatgctaatggctatcaattttcttcagctaattcgatgaatattggtcgtctggttccgcaaatttcttactacctctacacctatggacaattagtacgcagacaagaaattaaactaggagacgaagttaactttgctgtgccaacaggtaactttggtgacatcctagctggatattatgctaagaaattaggtttgcctattaaaaagttgatttgtgcatctaatgaaaacaatgtattgactgatttctttaataatggtgtctacgataagcgacgtaagttccatttaaccaatgcaccagcaatggatatcctagtttccagcaatttggaacgacttttatttgacctttatggcgaaaataactatgaagtcgctagtttaatgaatcaattgactcaacgcggtcattatcaagttagcggtgaagttttcactaaattacaaaaaaattttgcagctggttttgcaacagaagaagaggttaaatcagaaatcaaacgggtctacaattatgaccgctatgtaattgatccacatactgctgttggctcttttgtagcaaatcaatatcaaaagaagaccggcgatcaaaccccaatggtcattgtttcaacagccagtccatataagttcccagaaacggtgtatgaagccatcactggtggtcctagtatgcaaactggcgtcggtgcaattaaagaattgcatgatgaattaggcggtcaattatcaatcggtgtgcgtgccctttttgatcgtgaacccaagaccgaaaaaattattgaaccaaatgatatggaaaaagaaatcagttcaattttagatttgaaataataattaaggaaaaatagatatgaaagttgttaaatttggaggttcttccctagcctcaggtaatagcggagataaggccctaagtattattaatgccgatcccgaaagacaagtcgttgtagtctcagcaccgggcaaaagaactgaggatgatattaaagtaaccgatctaatgatcacttacgcatatatgagcttgaggagtaataattatcaagacatcgctacccgtatttttaagcgttatgaattaattgcccaatattttgagctgcctgaagcagaattagaggatattaaccagcttctacttacattgccgaagctaagttaccctaataatgactaccgcatggcaacctttaaagcacacggagaacgtcttaatgcaattttgattgctaaaattttaaatcatcaaggaattaaagcacgatttttagagccaaaagatgtaggtttaattgtcactggcacttctaataatgctgaagtcaatcctgaaacttatgtgaacttaaaaagaattaaggctgcaaaagatgaaaagatcatttttcctggcttctatggcattacaccatcaggacatattgctactttctctcgcggtggttctgacattaccggtgctattctagctagggggttaaacgctgatctttatgaaaacttcaccgatgtcgatgctattttttcagccaatccccatatcgttgatcagcccaagccaattaaaagaatgacttatcaagaaatgcgggaactatcttatgcgggattttccgtctttcacgatgaagccttaattcctgctattcaaggcgaaattcctgtcaatgttaaaaatactaatgctccagaaaaacctgggacaatgatcgtaccagaggacggctttatacctaaacacacaatcacaggtattgccggaggcaaaaacttcgcggccctttatttaagaaaatatatgttaaataaaggtgctggtttcaccttgaagttaatggaaattttgcaaaaacatcatgtttcatatgaacatatgccatctggaattgatgatattaccattattttcaaaaaagatgtcttaactgatcaattaattgatgttatctgtaatgaaattcaaactagtctaaatcctgatcaaatgcagtggattgatgattatgcaatcacaatggtggtaggtgaagggatgaaggacaagctgactttatgtgctagcttgctttaccctcttggtaaaaagaacatctccattcaaatgattaaccagggtgcatcccaaatctcaattatgattggtaccagacggcaagatgaagaagtagttatcaaaaccatttatgataatttcattgctcaggataaaatttaacataagctataatataacaaataaaaaaatggtaaatctggttattagtaccttgatttaccatttttactttatgagattatctttttactaaaaagtaactactttatactccaaatatttttctccatcaaagttcattttcacaataaatggattctttggctggatcatagcaaaggcttcatatttaaagcttggatcatagtaattaattactgatccaattgctgtaccatgtccaccaataatcatagtttgatcttgatatttggacaaaactagcttcaaagcagcaacatttctcttctgcgtctcttttaaagactcgccatttcttagcttataatcaaaatcttcccactgtctttcacaatattcatgaaaattagaaatccactcatcaccaatttttctttctctaaagtcagaaatagatgataatgttagtttcttctcgtctataactggttgaattgtatcaattgcacgcttgaatggactagaaaaagcttggtcgatgtgtttatctctaaagtaatcagttactttttttctatcttgcaaccccttttctgtcaaaggacgtgttaaatcatcatgaactgataaatcaggttgagcatgtcttacaaaatatactgttgtcataattttctccaaagcgataacagagactgtaaaatagtttgtgtaaggatgaatgattccttaaatttatttctttaaacattagaaaaaggagttcctttctcgtatgattggtttgaacaaaaaaacacatacagaaagaagaactccttcatgaatgattttaccaaagattttgctcaagctctattcaatccagacaaaataaatgatttattgcgcaaagagctacaacaggctgttaataacttgttagaagctgaattgactgcctttctgggctatgatccctatgccagaaatggctggaatactggcaactctagaaatggtgcttatttccgcaaagttgatacgcaatttggcccaattgaagtgcaagtgcctcgggatcgcaacggtcaatttcatcagcacacgctgcctggctacaagcagcactcggatatcttggaaagcatgattatcaagctttactccaagggcgtgaccaccagggaaatagccgatctaattgaaaagatgtatggcagccattacagtccagctcaggtatcaaatatttccaagcagatgattccaaaggttgaggcttaccacaaacgcaagctaagcgacaagtttttctgcgtctatttggatgcgacataccttcctttgcgccgagaaacatttgagcgtgaagcagtctatattgccattggcatcaagcctaatgggcacaaggaggtcattgactactgcattgcacctagcgagaacattgaagtctggacagatatgcttcaaaacatgaaatcccgaggcttaaagcaagttgagctttttctttctgatggtgttgttggcatgaaaacagccttggccaggacttatcctaaagctcattttcaacgctgtttggttcatgtcatgcgcaatatctgcgctaaagtacgcgtcgacgatcgtgaaaagatcatgaacgaattcaaacaggtgcatcaacagacaagcaaaaaagaagctgcagctgtcttgcacaaattctatgccagatggaataaagcttatagcaatgtcatcaaaggtttgaaggaaattgagcccgatctgctggtcttctacaattatcccaaacaaatcagagcttcaatttattcaaccaatatgattgaatcctttaacaacgtcatcaagcgtaaagctaagcctaaggcagaatttccaactgaacagtcgcttgatgcatttattggcatccaggcaatgagctacaatgaccgctatttcaaccgaattcataaaggctttggtcaggttcaggataccttagaatcttattttgaataaataattaaaaaatcaatttgcgagaaagaactatttacacaaaagatttgacagtttccgataacatattattatacgcgtggtgctagttaaatcgttctagacaataagccaaattataagctaaaattgcaatttccaaccggctttgaaagcctatcagactacgtgctcgattgttctcggcattgtaataggtcagaagcgaaaagtcgctttcaattgttctgcgaatagccatcaattgatgatcattgtgctttttagctcctgtcatatttttacgatatggtgtccaaagttcataacccatttgttttagctgttgatgcagttctttgcctaaatagccttcgtcgccaagaagatagtaattagatggatgggcattttccagcagttcaactgtctccttggcatcatgaactgatgcttttgttacgacataatcaagaatggaaccgtcatcgctaacaatggcatgaactttgaaaccatagaagtaaattttcttggtggccttataaccaatgttggcataaccgcgaaaaattttagcacgatagtttcgaattggttggcaaacaggtaccggaaagctgtcaatgatcaagaactgtccattcaggtcaacctttttattcatttcttgccgtatctgataaatcaattgcaatagctgacgtgaacgccgattaaaacgtgagtgtgataaacaattgaaacattcacagaatcttctttgtgattcaattcctgtcttagcttgccagataagtaaagccaaaatcagactgtccgtagttttaatttgatcaatatttcgccgatgagtaaactcagccggtgcatacaaacgataccagtgccgacaaattatcactaaatctttaaaactaacttgtaaatggtggctaaaacgcttaagcttaaggcagttcaatcagatcagactcttttctttttgatactacaacttgagtctagtccgattggacttttttattaactaaaacgatttaactagcaccacgcgtattattatatttttacttccgttatttgaatcagattttacttaatctaattcataaattcaataataaattaacttttccttgctctaatccaatttttcacgatacactaaaagcaaatgtttgtatactcacgaaaggattttatatgggattagaaatactaaatcatactgatcaaaaactaatttccaatgccgatttttggcaattagttgattttcaaagagagtcaaataaattctctgagtttaaaggcgtttcctttgtttctaatattaaatttattgagcaaaatcttataccacgttttgaccagatcacactaattcttggactaaccgataatggatcaaattcaattggcaaaagaattgaccaaattttaaataaacgtcgtgatttgattgaatatagctacgaacaccaagatagtcccttcactaaacgtattttagatggtagtttacagctttttttcaccaaacagaatttgattcacactaagctttatttaatggaaaatcaaagcaagtactctgccttttcaggttcaatgaatcttaccgatacggctgttaataaaaatatggaacaattagtttgggattacggcaatacttctgatccattattcaattgctatcaacaaatgtttcaagataaccttaatcaggctacaacttatattaatgctaaaaaactatctggttatttagaagacaaaaataaagacgatcttcgcattcatgtaatgcaagattcttctcttgaaatcaaaaacagtcctaattcaactggtaaagacataattattctcccagctgaagagataaaaaagtatcgcgaccactacagcaaagatgatgaattaaagaaattatctgaaaatgaaaaactcgttgcttctcaaacagttactttatttggtgaaggtggcaataaaagacgtaagctagatacaatcgggcaagatttatatagcttgactcagcacattattcgtcaagacaaaaaggcaaaagcagatacatcacaaattgaaaaagaagaagatctcttccctgttcctgttcagttttacaataatggtcaattattccaagcctctaaaattggtgataacatcccttctgaagttattacttctgatttaactgaagggcaattaaaaaatgcgcttcaacttttctgtgatatcactcatgaatataatacttacaaagaagttggtgaaggctggcaagcttgtgactttatgctgtttctatatgaatcaccatggctttggaaaatccgcaatttatatgaattatctggaagcaatgtatctagagaagacgtgcctattgctacagcactaatcggacaaggtcgaactggtaagtccaccctagggaaaagactagccgctaaattaattggtgctcataatttcttagatagtggaatgatggatccaaagaattatgcccttggcaagagtaatatcaatatgacaattaccaacacgctaagtgactatgtatatacaaatggtcctgtaagtccattaatgattgatgatgtcagtcccgagcttacaacccgtacttactttgaaagattcatcaaggaagttactaacaatcgtaatttaactcatccctcaccagcattcattttcacgatgaatagacaagaaagctctattaaatcacaattttctctaaagcctgaaattatgcgtcgtttatggtatttaagctttgaatctactttttcaggtgaaagtgatcaacgtaatgctgcattaactagcttatttagtcgtgcaaatgatgatctttttaaatattgtcaagttgaattagcaaaattctttactaacgttagtgttgaagatgcgcagaagattgaaagagacttcttatatccaatcaagcatgttttaaaaactgcacttgataaatttgatatgtataaccaagtcagcaaatattttgaagaaaattacgattactccctatttgttggtcgaaatgattggggaatgttaatcaatcaagcaaaaatcggaagcgatatcttatttattaaacaagatgaccggctaaaagcccaaatcaataaagaacttttcaataaaatctccgatcaaacggcgaaaaacagcggttctactatgcttgatcgctactttaaatatttgcctagaaaatatcacattgcatcgcaacaaactagcaccggttttattattgatgttgaaaactttgataaatggcttgatgatgatacgttaatgaataagtatcaaaacagtagttcatttagagataagcaacaaagagataaccaagcacaattgactcaaacagttgatatgctagctaaggcaatgttagaagatcgtgaacagcgacgaaaagaagaggctaaaaagaaacgaagctggcttggtaattttttccacagaaattagtttataaaagatttcatattcaaaataagacttttaacctcttaacagttaaaagtcttatttactatagggataataatgtttggactttgattgatattcttttacagaaattatcttattttgatcattaaattctataattgatacaccatcgaattcactaatttttccttgataattacatttaaaatgagactgtaaaatattttgtgtaaggatgaatgattccttaaatttatttctttaaacattagaaaaaggagttcctttctcgtatgattggtttgaacaaaaaaacacatacagaaagaagaactccttcatgaatgattttaccaaagattttgctcaagctctattcaatccagacaaaataaatgatttattgcgcaaagagctacaacaggctgttaataacttgttagaagctgaattgactgcctttctgggctatgatccctatgccagaaatggctggaatactggcaactctagaaatggtgcttatttccgcaaagttgatacgcaatttggcccaattgaagtgcaagtgcctcgggatcgcaacggtcaatttcatcagcacacgctgcctggctacaagcagcactcggatatcttggaaagcatgattatcaagctttactccaagggcgtgaccaccagggaaatagccgatctaattgaaaagatgtatggcagccattacagtccagcccaggtatcaaatatttccaagcagatgattccaaaggttgaggcttaccacaaacgcaagctaagcgacaagtttttctgcgtctatttggatgcgacataccttcctttgcgccgagaaacatttgagcgtgaagcagtctatattgccattggcatcaagcctaatgggcacaaggaggtcattgactactgcattgcacctagcgagaacattgaagtctggacagatatgcttcaaaacatgaaatcccgaggcttaaagcaagttgagctttttctttctgatggtgttgttggcatgaaaacagccttggccaggacttatcctaaagctcattttcaacgctgcttggttcatgtcatgcgcaatatctgcgctaaagtacgcgtcgacgatcgtgaaaagatcatgaacgaattcaaacaggtgcatcaacagacaaacaaagaagaagccacagctgtcctgcatgacttctataccaaatggggcaaggtttacagccatgttatcagaagcttgaaagacatagaaccagatctgctggtcttttataactatcccaagcagatcagagcttcaatttattcgactaacatgattgaatcatttaacaatgtgatcaagcgcaaagctaagcctaaggcagagtttccaactgaacagtcgcttgatgcttttattggcattcaggcaatgagctacaatgaccgttatttcaatcgaattcataaaggctttggtcaggttcaggacaccttagaatcctactttgattaaataaataattaaaaaatcaatttacgagaaagaactatttacacaaaagatttgacagtttctttaaaatgccattcggcaatgctcgtatcaccattaattatgagtctttctattggccaagcaattacttttccttgtttattccaattttcaaaccaagatattatctcctttttatttctgtaaactggaccatagcattcactataaatagcattttcgtcaaatgtattttggactacttcaagattaggacttagccatgctcgaaaataatttctaattatttgctctttatccatttatagcgatgtccagcctttcttgtgaaaatggttaaacaagtttttattttctcttaaaagttgcaaaatattttgtttatcatctactacaatattcttatcttgtaacaaacccataatcgaatttagttgctgatagtcgacatttccaagtgtcaaagtcatatttgttcccttacctaaatccaaaatcaaatttaaataatcaggattaaagtcaataggactaagacgtacatttttacgatagacaacggcagctttctttacatcagataaattaataacttgcttactctttttatgtaaccctagcagttgcatcaattttatcacatcgttaatatcataatttataattgtaatattttcgctactaatctgccaatacggattaaaacaagtaggtaaagttacaaatacacctaaaattagtacaataaggaatagccaccaagcttgataaccaaatcctgtcaaaaatagtgaaagtaaaactaccacaatcataccgattaaaacatggctcaatttaacaggagttccaacaataatttttttcatcacgttcaccttcttactttacttcctatataatattataaagcgctttcaaaaaataaactatagaggttaaaaatatgaaaataggtattattcaagctacatcgcaaaaaagtaaaaatttcatattagagaagtatatcaaagaatctgtaggatccaatgatcaagtattcaattttggtatttatcaagatagttcggctagtctatcttacgtgcaagtttccctagctgtcgcattattaattaatagcaaggcgactgacttcattgtgacaggatgtacttctggacaaggaatgatgcttgcatgaaatacttttcctaatattcaatgtggttatatccccactccacaagatgcttttctttttggtcatatcaataacggcaatgttgtctcctttccactaggacttaattggggttggagtggtgaaatcaattttgagcagactataaaaaatctttttgaacagccttggggacaaggttatcctccttcacaagcaaaaagaaagataagaaatgctcaagaagttaaaaatctcaacgtaattagtaagaaatcaatgattgacattatacctaaaattgatcctgatcttattttccctgtgctcaattatgaaccgatttataacttcataattaaaaacggaaccgatcaaaaattaatttcaattatcaaaaggataaaaaatgactacaaaaattgaaaaaatatctcctaaaatctacaaagtaactgataacgataagcatctaggcactatttctacttatcacaatctttttcataacaaatatatttatctaaaattcaatctaagtgattactctgtaaatattccattttcaaaaatagttcaagcagagcaccaagcattgcaagtcatgattgattcaaatgaaaatccaatcgtagattttttattaagaaatggttttatctgcaaacgacactgttatacgcttaccgttaacaaaaaagatttaaaaattgagatcaataacaaattatctcttcattttttcaatacagaaagtcccgattacgaaactgtcaaatcttttgtgtaaatagttctttctcgtaaattgattttttaattatttatttaatcaaagtaggattctaaggtgtcctgaacctgaccaaagcctttatgaattcgattgaaataacggtcattgtagctcattgcctgaatgccaataaaagcatcaagcgactgttcagttggaaactctgccttaggcttagctttgcgcttgatcacattgttaaatgattcaatcatgttagtcgaataaattgaagctctgatctgcttgggatagttataaaagaccagcagatctggttctatgtctttcaagcttctgataacatggctgtaaaccttgccccatttggtatagaagtcatgcaggacagctgtggcttcttctttgtttgtctgttgatgcacctgtttgaattcgttcatgatcttttcacgatcgtcgacgcgtactttagcgcagatattgcgcatgacatgaaccaaacagcgttgaaaatgagctttaggataagtcctggccaaggctgttttcatgccaacaacaccatcagaaagaaaaagctcaacttgctttaagcctcgggatttcatgttttgaagcatatctgtccagacttcaatgttctcgctaggtgcaatgcagtagtcaatgacctccttgtgcccattaggcttgatgccaatggcaatatagactgcttcacgctcaaatgtttctcggcgcaaaggaaggtatgtcgcatccaaatagacgcagaaaaacttgtcgcttagcttgcgtttgtggtaagcctcaacctttggaatcatctgcttggaaatatttgatacctgagctggactgtaatggctgccatacatcttttcaattagatcggctatttccctggtggtcacgcccttggagtaaagcttgataatcatgctttccaagatatccgagtgctgcttgtagtcaggcagcgtgtgctgatgaaattgaccgttgcgatcccgaggcacttgcacttcaattgggccaaattgcgtatcaactttgcggaaataagcaccatttctagagttgccagtattccagccatttctggcatagggatcatagcccagaaaggcagtcaattcagcttctaacaagttattaacagcctgttgtagctctttgcacaataaatcatttattttgtctggattgaatagagcttgagcaaaatctttggtaaaatcattcatgaaggagttcttctttctgtatgtgtttttttgttcaaaccaatcatacgagaaaggaactcctttttctaatgtttaaagaaataaatttaaggaatcattcatccttacacaaactattttacagtctatgcatctgtgcaacagtatgctttttcccgtcataataatatcgcttaacaattttatctctaacttgatcatttaagtcttgtacctgagcctgctgctgataatcaactaaagcactcacaccatagtcaactaacataatcagaaaagcaagaacattgattaaaataaacttagtccaattacgacttaaaaggatattcgtctcttcttgtacaacgtaagtattggtaattgataaagcaggaataataatccaaccaattgcagttaaccagaaacgaactggattggttttaataaaagctttcaaattcatcttactttatcccctttcttactttttaatttaatttcttgatcaaattttgcttttaattctggcgtaaagttgtgagcaatcatcaaaatagtttgatctgttttgagcaattcatcaatgattttttcggtagctttttgatcgatcgcactagttacttcatccattaaaacaaacgattgctcgtgtatttccgttcgcgctaaaacaactttttgccgttgtccaccagacaaattttcactttttagatcaattgttgtattaacaccatctggcattttggctaagtcggattggagttgaactgcttgaacaacatcttgaagcttatcctgcaaattttcgttaaacattgtaatgttctctttgatcgttgcgggaaaaactactggattttgcggcatattgccaattctagcttttccttcaggaatgatagtttcattttcatctagataggtcaccgtaccagattcaggttttagcttacctaacaaaacattaaacaaggttgattttcctgttcctgaatcgccagtaagcaaaactttctgccctttttttattgtaaaatcaggataaaaaattgtttccccctgatcgtattttacagacaagcctgaaactttaagaccgtaggctgatactttatctttattttcatcaggaacttgctttcttaaatcggtaatctgttcgcgtaaagccttagttgacttaacttgcgttaacgactgagtaatattccaaattgctgaaaaaatcgtaaatgcaaaaccactagcaactgcaaaatcaccgaatgaaatcatattaagcaaaaatatgattccagcaataaagctcataccaatttgtgcaattgaattgctaaaagcattaatcaaataacttacacttcttaattttgcactacccttacttgcgtccacataatcactacttgatcgatgaatttgcttaaccaaacgactgtatgcactataacgacgtagttcctgcaatccaccaagccaatgagcaattgtatttaacagcttttcattctttttatttactttatctgtggcagctgatgttttcttctccataattttaggagcaaaaagtgtaatcacagctaaaatggcagtaaccaaaattagaatccagttcatgcttgctagtaaaacaatagcaatcacaatctctaaaaccccacttaagatagtaatccaaggtgtagcataatcatctgataagatttttaaattggctgttaatcggttctgcatactagagactttttcatcacttttttcataatagtaatgatgcatgatttcttgccgaattttatgcagatagttttgcgtctgcctagtgaaaacaacggtagtaattggtaaaagcaacgaagtgaataatgctaaaacaaactgcattatttgccaataaacatatgtattaaaattaccagcagtaattgaattcagagcatatttaaataaatattcactaaaactcccaaataatgcgtataaaacatacaataagataataatgcaggctcgaaacgagactgtaaaatagtttgtgtaaggatgaatgattccttaaatttatttctttaaacattagaaaaaggagttcctttctcgtatgattggtttgaacaaaaaaacacatacagaaagaagaactccttcatgaatgattttaccaaagattttgctcaagctctattcaatccagacaaaataaatgatttattgcgcaaagagctacaacaggctgttaataacttgttagaagctgaattgactgcctttctgggctatgatccctatgccagaaatggctggaatactggcaactctagaaatggtgcttatttccgcaaagttgatacgcaatttggcccaattgaagtgcaagtgcctcgggatcgcaacggtcaatttcatcagcacacgctgcctggctacaagcagcactcggatatcttggaaagcatgattatcaagctttactccaagggcgtgaccaccagggaaatagccgatctaattgaaaagatgtatggcagccattacagtccagctcaggtatcaaatatttccaagcagatgattccaaaggttgaggcttaccacaaacgcaagctaagcgacaagtttttctgcgtctatttggatgcgacataccttcctttgcgccgagaaacatttgagcgtgaagcagtctatattgccattggcatcaagcctaatgggcacaaggaggtcattgactactgcattgcacctagcgagaacattgaagtctggacagatatgcttcaaaacatgaaatcccgaggcttaaagcaagttgagctttttctttctgatggtgttgttggcatgaaaacagccttggccaggacttatcctaaagctcattttcaacgctgtttggttcatgtcatgcgcaatatctgcgctaaagtacgcgtcgacgatcgtgaaaagatcatgaatgaattcaagcaaatccatcaacagccaaataaagaagctgcgatcaaagtcttgcacgccttctatgacaagtggaacagagcgtacaaccatgtcatcagagatctcaaagagattgagcctgatctgctggtcttttacagctatcctaagcagatcagggcttcaatttactccaccaatatgatcgaatcctttaacaacgttatcaagcgtaaagctaaacctaaagcagagtttccaaatgaacagtcgcttgatacttttattggcattcaagcaatgagctacaacgaacgctatttcaatcgaatccacaaaggcttcggtcaggttcaggataccttagaatcctactttgattaaataaaagattaaaaaatcaatctacgagaaaaatctatttacacaaaagatttgacagtttcctcgaaacacattgcttttaaatagctcttttaaactcatacttctcctccattaatcattaataaaaatatttatcatcctttaatcttactacgcaaaaataattttttacacatatttttttaatttttaagctaaatcatatttcataaacataaaataagactagtaatcaattcaaattgactactagtctctttgtttaccaaaaactacatttttcgcaaaacgtcgatcaatacacgacgtaagtcttcgttcttcttacccatttcttcgatcaatctagctttatcatctaaagcctgattatatttatcttgcaaagcattatatctttgctccagttgattgtaatttctgattactgtattgtagcgttcacgcaaaccgctagcttcatcaaattcataattattccgattatcataattatttcgattattatagcggcggttagactgattattacgtgagcggttattattttctcttctgatctcaaaaggatgcttattttgtcgcttacgttgattttgcgtttgattattattatttcgattattgctattcttctgattattcttacgctcaaagtccttagattgaccttcacgactttcattctgatccttagaatgttgctcaggcttttctttagtttctgtttccttattttcagccgctttttcagcattcttgcgatacttttgatcaatcttgatattttgataaaaaggactaagttcagctataactttttcaccatcttcaaccgaaaaacttccccgcttgttaactggcttaataaagttggtcttcacaattgaagcaatcttatcctctaatttcttttgaatagatttatcaatcttatcattctttataactttagctaaaatcttacgcttagtaattgtcttaacccgcttagatttagaagctggcctcttatcagtagcatcctctttagctggggcttccttagcacgacgttcaattgcatctgcgtaatcttgtacattaccaataattaatttagcaacagccggcttaaaatattttcttcttcgcacagtaatacttggttgtttacgtgtacgcacaaagttataaattttaatctttagtttttgttgtaattctttacttgcattaggcaacaattgatcaatcatttgattcattgttaccatttcatttaaatcaatattttgttgttctaataatgtttgctctactattcctggcatttccaatcctatattcttttaattttttcacaacaaaaagggccattacggcctattttgcaataatacatcaattttctcattaataaacttaatgcactttccattttacaacattaacgctatttacgaaaagggctacaagcatattctctattttttaaccaaaacaagcagcatcccatcgatactgctttattttatgcgcagttgcactagactttgactctatttctattttacgtgctaaccagccttttttctagttttattttcttaactaatccattaggttttacatataaattcttaatattatttcgctattataagatcaattaagatgaaaggaatgagaaccttgattaaactactcttaattggtggatcatttttaacgcttggtttaatggccatcagctcagtattaattaataaaccagcagtagcaaaggtaaaacatcgccactaaaaaccagaataatatatgttaataaatcttttcccctctaactagaaagaccaggttatgtactccacatagcctggtcttcttttcgtcttattctttatggttggtagaaaattgcaccttggtcaacaattacatctggttgcaacttacgtaaactcttactttcaacacaatattttgtattattcaaatactctttgaagttcttagtttccaagtgctgcttgtaagcttcattattacgataaacttcaatagctaaccattcatttggttgatcggcaacagttcctgcaatcattgccaaaatatctttttcttcttcgactgccgttttcatttctttcattacagcatgagcaaactcatcgcccttacctaaagaaacaccaatttcagtcagataaataacataatcatttgatccggtaactgctagtttttctgcctttgtagaaataaattccggaaacaattctacctttactcgactagttaaaatatctttagcaacgtcagtaaaatccttaaattgctttgaattagcatgagtatcataacttgcttcgtcttgatagcattctactacaaaattagtagtttcttcgtcatgacttgtctgcataaacaatgtgcctggttcgttttcttgagaagtaagcatattatgttgccctgccttaacgaactttgcatgatcctctttattagtttctagtttatataaacgcaaaattggtgtttgttttaatttcataacttctcctccaagaattaattttgtcattattatactaaattttatcgcgtctattagtaaaaaacatcccttagttaagggatgtcacaaaactataacgtgtaattaactttcttaaacttgtagtccttcatttttttagctaatttcttgcttctgaagtagttaccaccatcatatctactagaataaaccagcacgttatgctttttaccattaatggtttgtggtaccactcgataaagactccaattttcaaaagtaatccacggatcaatctcatagaatgtatcattcttcattttggtagttttaccagacatccagttttgcgttaccttatcaaagttcttctggttagcaattctaccattgaagtaatcactaattgtcgaagcctcctgggtaaatattggtttgccattaacagtatgttcagtaaaggtgatctttgtgccattatgtgcattacgatcataagagtaccaagtaccctgcatcttttttggaatagtaacctgtacaccattaccataagttgaagcatcaacagtctcaacttgactagccaaaccagttaatcctaaaacaagtaccattgatgttaaaggtaacaaagttctttttagcataaaaatcatctccagaatgtaaaatatatgagtccgctttcataatatattttacagtatcttatagtacttagacaagatatttttaactttacagattaatattcttgctgcaatagctttataaactcactacttaacgctgaatttgacttataaaaagccattatcttttgctttattaactgaccatgatcaagcaagaaaagtggctgcaaatctgtagtattaattaacctagccgtattctcatttaaaataaaatagccagacctagaggcgaccaacagtgctgcttcttcgaccgagttagaagcgatgaattgactgccaatttgatacaaatctttaaataaatgtagctcactaacctcttcttcaggtttagccacaataaaacaagtcatatcattgagctcgtctttttcaatcatttgaatgccattaggatacattcccttgggcaaaattgccattacaccagcttgagtcaattctgtttcatcaaagttaagattctcgtcacgcaaatcattgattgctatgtctgcttcatcttcattcagttttgcaaaagcaccatcatgactagtcgcaagtagttttacatctacattaggatgttttaacacaaaatgctgcactgcctgatctaattccttacgacctaattggtcaaaatatgcaatctttaattccgtcattttatttttcatccagcggtgcgtgtccttcttctgctactcttcttttatccttagtatcttcatgcttattaagtgccatcaaggcaaaaaagatcaaattcaaaccactaactacaatgccaaataattttattaaattgagtttcttttctttactcattttttaacctcacaactaaaaataatcataaaatgatacatcgcctttaacgaaatctaattttttgatgcggtaatctgtaattaatcctagtttaacagcagcattcatggttagtctacctaatagcacctgggtccacgcggtaattgatcccgaaaaatcaaccaatgcatcttccttacgttctaccgctaccttacgtccatgattacttaattgccaaactccaatattccaaggacactgttcatcgctattgacttccagattaaaatcaccttcttgcattggccgcatacaagccaaaactttttcaaaatcaataattcgactcatcatataaggacgcaaatcaacttggagttcgttttgttcaggaaaaagttcagctcgtaacgatttctctggtacgctcattttaaattgcttaacactgcccgcgtgcgaacccataaaaccaaacatactcagtaatccctgcggcgtaattgcgtacatttcatcagctaaaaaagtattgtctctaatgcgataaatcaagtaactaattggccgctcatccgcgtcaaaataaacggctacattgcggtgatgataataagaatcaagtctattccaccaccatgcctcacgtacaaccgtgttacgttcatcatcagtatgcagttgacgttcataaagttgaatcacaccattttgaacagctaaattgtcccacttgccacgcactatatgaccagaacgtggtaatttaaaactacgcaatgcgcttccatcaaagcgatattctttttgataaatactattgctaaacccgtactggcgataaaagctctccgaaaatggtgccaggttagcaaacggaatatcttgcctatgtaagtcatgcaaaatttctttcattaattgggaaatatgaccttggccacgatactcaggatatgaagctacataacctattccagccatcggtaaatgatgcccaaaaacatcacttttaaatcgattaaccataatatagctagctaatttttccttatcaaaatagccataacctgtactatgatcataacgactcataaaattttcgtctttagtcaaatcattatttttcaaaaatgcatattgaattaatgccgtaatttgctttaaattattcttatttttctttaattccatgcttattcctatacgtacatctataaatttattcattactattttagttcattttttaaatttttaactagatttttcataaaaataaaccggaatcataaaatcccggtttattttacgcaacgtattcttgataaagctgagagataaatgcctgcatctgttccactgaatgtctccggctacgagcacattctttagcagggcgatcacataaaaagcacttacgtggctgcctgcccaaatctctgcgtgaaattgcagcttgtttattttttaccaacacgtctgcatcaaagagacgtcccaatgatatctgattctcaaaatcaattgttgagcgctttactttttcaattgacaaagataatacataaaagttttcacagccactatcatcattaagctgtgtcaccaatttaaaatgataacctaggttagtccaagcattttccagctcattgatacccaacataaacattttagttaaatagcgattattcttgattggtcctgggatattcatattaatgtcgactagagtttgattaggatacttattaaaaatcttatgttgtacagctactcgcctatctttagctgctaaaacttgggcaatatcctgcttttttccttcattaaaaatattcatttttatcacccagttaattataaatgattgtgccgactccgtctgctagtttgttggcattgctcaaagaggtgataattgctaaattacctgttttttctacaaattcaattgcagcttctatcttaggcttcatactcccagctgcgaaataacctgctgctagatattgtttgagctgttcaacttttattttaccaattgcttgttgattttctttgccataattcaaaaatgcatgatccaccgttgttagaattactaattcatcagcgttgatatcttctgccattttagcagcggaaaaatctttatgaattacgccggcaacacctctgagatgcccatctttcacaataacaaggatgccaccaccgccacaggcaatcggaataaataaatttcctaaagtagccgccatcactgctttaattgaatgcaatcgattttcagcttctgtaaattgccaagcatactttgaattaaagacctcatcagttacttccatctcatttaagccatatttttcatagatttcttctcccacctgagttgttcgatcatgaaaagctgtcaaacaatgcataaagatcaattggtcatctggtgtaccagtcatttgcatcattttcattgtgaccgtatatggctttaataatttaattcgttcagaccaatcattttcacccatcgaaaccccaacatcggtataaacaacattggctcctttaacgccttgagcaatatcatctgtgatcaaattttttgaacctgaatcttgggcaaaattttgagcaattttttgtacatcaggatgtgtaaacaaaggcttgggtgtaacaatatgtacattaacacctaacattgagccacaaactaaaagactgtcggcaacattatcgcggccatcacccacttccaaacaggaacgccagaatatttagccagctcttctacatcttcttgagcaaaaccgcgatattcaattccatcatacattgagcctaggactttagccgtatccttgacgctttcttttttacctaagtggatctcgcttgcgcctagatattctggatgagcacctaaatcattacaagctactacaaaagcagatcgcgtcctagttgaggctttttcaaaaagtagtgcaatatttttacctttcagatattcatgtgggatatgctcttttttaagttcttttaaatgtaatgcaaaatcaattaaatatgaaatttcagctggagtatagtctttacaatcgagaaaacttctaccttgaaaaacattttgtaaatatttcattttttgcctcttataaatcttcacgaatcaacggacacgacatacatctaggaccgccacgaccacgtgagagttcactagaccgaatctcatgaacgatgatgccatgttttcttagcaaatcattggatacataattacgatcataagtaacgacttcacctggtgcaattgccaaggtatttgagccgtcattccattgttcacgtggtgcggcaattggatcaccaccaccagttggaattaaatccaattcgcttaaatgtaagttttctttcaaaacctgcaccaaatcattcttttctgtgatttttacaccgttgtgatcatcgggctgtagaacataaatatcaattttgccggctttatctaaaataaagggatgaaccgtaaattgattataattaatcattgtaaaaactatatcaaggtgcatcatagcatgattgtgcggaatcttaatcgctaaaatcgtatcataacttgaatgatcaaataaattatgagctaagtcagtaattgcagttgcagaagtgcgttgtgaaatacctacagctaacacatggttatttagaactagttcatccccgccctcaaggcgaccatgatgataacggtcacgccaaactggaatagttgcgttcttgaaatcaggatgatttttcaaaattgtttccataaataatgattcacgtcgtctagctctgaaagtcatccggttaatggtcatccctgaaccaattgcagcctgttgatctcgagtaaaatatacatttggcattggatcaagataaaaagggtaatctgggtcctcagccaaatctgctaaagatggggtagaattatgaatcgcactttttctaattccagcaatcaccgtttttaccatttccttagttagcaattcttggagatagttcagcaataattgatgcaaaggatcctgttttttaatacttgattcatccagtaactgatctaagaatgcccgacgaactttctcatctgttaaagattctgctaataaatcctcaagatataatactttgatcccctgctgcctcaatacatgcgcaaaagcatcatgttcttcttgggcaatcttcagataaggaatatcgtcaatcaacattcgatgcaaaatatctggggctagattttctagttcttttcccggtcgatgtaacatcaccgtttttaacttaccaatttctgaataaacatgaatcggactcgacattcaaccaccttctattaattattgtacccgtttacatttattatggatcaattaggtaaaagttacagtattatcatattgcagcaatgatttttttcattaaaggtgtaacttgatgatctttacgccaaaccagctgcaaatgtgttatccaattagcatgtttaattgcgatcatattttcttgggcataagttgtcgcaattgattctggtactagcgctactcccatttttctcttggcccaagtaattgctgtccgtgaatcatcacacttaaccgcataaaatggtttaagcccatgatgtgcaaaagtttgattaaaaatatcctcaaagcgacgataaataatcaatggctgatctgctagatctttaatgcgtaattcttttttttgctgaaaatctgggtctacactaatagccatcattttttcagttgttaaagtcttagtatttaaacctgtctggttgtaaggcgttcgtacaatgcctagatcgattgtctttttttctaatttatccaggatgccataagtattatcttcataaatatcaaaagaaatttccggataatattttcgtaattcattaaaagaattcattggtatcaagcccgttgaggaagatgccattccaattgcaatcgttcccaattcaccggaaatagtcttatgtacttggttttcagcattttgagctagagaaataatttcattggcatagctttgaaaaatttgtcccacatcagttagctcaataccatgtgccgttcttttaaataattgcgcgcccaactctttctctaattgttttaattgatagcttaatggtggctgtgcaatatacaagcgcttagcagctgctgtaatctgcttttcttctgctacaactagaaaataacgtaactgttttagattcatattatttatcctttttttatttcaattgatagtgatattaaaatatttaatatcttatattgtattttagtattttattcatagcaatatctgtgctaccttattaaggtagatttggagggaaaataatgtctgataaatttcacggcttaactcaagccgaagcagacaagcgcttaaaagaagatagcttaaatgaagtaccagagcctgaatacaatttctttaaagagttcttgtctaagttatggaacctatccgcttggattctagaagctgctttaattctagaatgtatcttgggcaaatgggtccaatcattattcgtgttgttgatgcttttatttgctgcatttaacggtgcatctaagaaaaagcaatcaagacgagttttaaataatatttcacacaagttgactcctactgtatcagttgaacgcgatggcaagtggatcaaacttgattctaaacaactagttaaaggcgatttaatctcacttaaacgcggggacgtactcgcagcagatgttaaaattgttgacggtaacttagcttgtgatgaaagctcaattacaggtgaatctaaaccagttaagaaagcaattgatgacaccgcctttgccggtactacagttgttgaaggtgatggcctagctgttgttactgctacaggtaaagattctagaagcggtaagacgattaatttgatcaacaattccgctgctcctggtcacttacaacaacttttgactaagattatctactacctttgcttactagatggtgttttaaccttagttattattatcgcctccttcttcaaaggcggtaatttcaatacctttattaatatgttgccattcctggcaatgatgtttattgcttcaattcctgtagcaatgccatcaacttttgctttatccaactcatttgaagcaacccgcttaagtaaagaaggagtcctgacttctgacctaactggaattcaggacgcagctaacttgaacttgcttttacttgataagactggaacaattacggaaaacaaaactgccgtagccgcttggactgatctaagtgacttgcctgacaaagacgtgcttgctttagctggagccgcaactgataaacgtaatgctggtattatcgatacagcaatcgatgaatacttagtagaaaataacattccagtcatgaatgctgaaaactttactccatttacttctgacactggttattctatggctgatgttgctggacataatgtaaagcttggttcatttaagcaattatctttgatcgataagcatgccgatgaagaaatttctggaattaatttcaaggcaggacgctcagtggcagtcttgattgacgataagttagctggtgtcttcatcttacaagataaagttagaacagactctaaagcagctttggctgaactcaagaaacgtggcgttcgcccaattatgttaactggtgacaatcaaaagaccgctgctgcagtggcagaacaagttgatttaactggtaaagtaatttcgattcacgatttcaatgaaaatactgatattaatgatttggccggtattgctgatgttttaccagaagataaactcaagatggtaaagcttttccaagaaaaaggctatatcgtagggatgacaggtgacggagttaacgacgcgcctgcattaaaacaagctgaagtaggaatcgcagtttcaaatgctgctgacgtagctaagcgttcgggtaaaatggtattactagacgatggtctaggctcaattgttaaaattttagacgctggacatcgcgtataccaaagaatgactacttggtcactaaccaagcttgctagaactgctgaattaacgatgctgttaacttttggctatcttttctttgactacatcccaatggccttgaatgcaatggttatctataccattatgaacaatatggttacgatgatgattggaactgacaggactcacattacttataagccagaaaactggaatatggctaagcttgctaagatcgccttttcactagctgctggttggactttaattggtattgggtttgtttggttcttaaacacacacggttggagtcacggtgctgtttctactatggtttacgtatacctagttcttagcgcaatgttgattgttttgattactagaactcgtaagtacttttggcaagattacccatccaagttggttggtagtgttcaaattgcagatgttctattgacctttatcttagctctttgtggttgggcaatggtccagatttccattcaaaacttagcaattactgtaattgtagcgattattgctgccataataatcgacttaatttaccaacctgtgatgaaaaacaggtagattattaccataaattttataaattaaaagacttctaggaactttgaactcttagaagtcttttaatttatctttttgattcacgatatcctgctgcacgtgctgctgctttactcttgaagaaaactgcattttcacgattcattcgataattatgaccgcgcattacgtgaaagatttttgatcgtttattatcaacaattctgtaattactggtataaatcttagttttatcacgatattgatgctttctccttctgtgatgaatagctgcattaacaactgatgtcgacccctgcaaatttgcaggcagaacactgatttctcccactaacatcagaaatgcaacaatagtcacaacccaattcttgcatcttttcataaaaacactcccttaatatgtcactatatttatatagtatacgtttatatatgaagtgttcctacgtttattagaaactagtttgaaactgtcaaatcttttgtgtaaatagttctttctcgtaaattgattttttaattatttatttaatcaaagtaggattctaaggtgtcctgaacctgaccaaagcctttatgaattcgattgaaataacggtcattgtagctcattgcctgaatgccaataaaagcatcaagcgactgttcagttggaaactctgccttaggcttagctttgcgcttgatcacattgttaaatgattcaatcatgttagtcgaataaattgaagctctgatctgcttgggatagttataaaagaccagcagatctggttctatgtctttcaagcttctgataacatggctgtaaaccttgccccatttggtatagaagtcatgcaggacagctgtggcttcttctttgtttgtctgttgatgcacctgtttgaattcgttcatgatcttttcacgatcgtcgacgcgtactttagcgcagatattgcgcatgacatgaaccaaacagcgttgaaaatgagctttaggataagtcctggccaaggctgttttcatgccaacaacaccatcagaaagaaaaagctcaacttgctttaagcctcgggatttcatgttttgaagcatatctgtccagacttcaatgttctcgctaggcgcaatgcagtagtcaatgacctccttgtgcccattaggcttgatgccaatggcaatatagactgcttcacgctcaaatgtttctcggcgcaaaggaaggtatgtcgcatccaaatagacgcagaaaaacttgtcgcttagcttgcgtttgtggtaagcctcaacctttggaatcatctgcttggaaatatttgatacctgagctggactgtaatggctgccatacatcttttcaattagatcggctatttccctggtggtcacgcccttggagtaaagcttgataatcatgctttccaagatatccgagtgctgcttgtagccaggcagcgtgtgctgatgaaattgaccgttgcgatcccggggcacttgcacttcaattgggccaaattgcgtatcaactttgcggaaataagcaccatttctagagttgccagtattccagccatttctggcatagggatcatagcccagaaaggcagtcaattcagcttctaacaagttattaacagcctgttgtagctctttgcgcaataaatcatttattttgtcttgattgaatagagcttgtgctatatttttggtaaaatcattcatgaaggagttcttctttctgtatgtgtttttttgttcaaaccaatcatacgagaaaggaactcctttttctaatgtttaaagaaataaatttaaggaatcattcatccttacacaaactattttacagtctcactagtttaattacttatcttcatttgcaccaaaaatatccaaaaattgtaaaaacaagttaacaaaatcaagatataattgcaaagcacctaaaactgcaagcccattagttgaaagatcatcaccatattgtaaataaatatctttcattctttgtgcatcccacgcagttaaaatagtaaatataatcacagcaataatcgaaaaaacgtagtcaatgattggattatgtaaaaacaaattagctaacatggctacaatcaacccaattaacgcagcagaagcataagaccctattcgactcaaatcttttttggtaattgttcctaaaatcgccattgttacaaagacggttgccgaagctacaaatgctgaagcaatattttgtccactatatgcacctgcaataaaagcaaaggtaacgccgtaaacaattggtgttgtgcaataaaggcagagataggtcccgcaaaaaccgtcattgtcaaataagcactaattgctgaaacgaaaaccgctaaggccatataaccatatattttgctaaaaaacatttaatcctgaatcattagcatattgctgttgaccagattcttgatcaaaattatccatcttaatttctccttcttaacacataccctgtactttaaatataacacctgtttaattaaaaacgtagcgagacaccctaccaaaatataaactatctcggtcactttggactagacctacaataaaaaatatcatataattggtatagacaattatcaaaaatgaggtactattatgacaatgagatctttaggtctgtcaatttatccaggccacagcaaatttgaaggcaacgctcactatctggacttagctcacaaatatggcttttctcgtatcttcatgagtatgcttgaagtacaaggcagccctgaagaaaccaaagctaagtataaaaaaatcattgaatatggcaataaattgggatttcaaacttttttagatgttaatcctgcaatcttcaaacaactaggtgtcagctatgatgacctgaaattttttgctgatattggtgcagcaggcatccgtcttgacacaacatttgatggtgcaattgaagcaatgctttcttacaacccatatggtctaatcattgaactcaacatgagtaataatgttgactatcttaacaatattatttcttaccaagctaatacaccgtttatttatggctgtcacaatttttatcctcaacgcggtactggcttaccttacgacttctttatcgcttgttctgaacgcttcaaaaagtttggcattcattcagccgcttttgtctcaagtcaagtaggtcaaatgggaccttggaacgtggaagatggtttaccaacgcttgagcaagaccgtaatttaccaattgatgtgcaagcaatgcatctctgggcttctgggttgattgatgatgtaatcatcggtaatgcttatgccagtgaagccgagttaaaagccttatctaaagttaatcgctatcaattgatgttgcacgtaaactacgttactgatgttaataagattgagaaaactatcgtagaagcgcctcaacatttccgtcgtggtgatatcactaaggatgtaattcgttcaaccatgccccgtgtaacttatgcagatattcctaatccagtacacgacaacaatgtagaattccaacgcggagatattatcattggtaacgacaactttggtcattacaaaaatgaactacaaattgtccttgaacctcataaggagtcaaggatgaacaaagtcggttctattagatcagacgaattattcctgctcgactttattaaaccatggtcaaaatttaaattaatcggtaacaaataataaacattctaagctaaatagtgaattagttatccgacgggataattgattcactatttttattcttttgtagaattaaagtagtggtaaaacgatatgccctgaggtctttagacacttgatgtcgcataataaactggcagttttacttaagttttcaatagtctcttcgaagaatgtggacactagatgtcgagtttagaaaattagatctgatttcttaagtaaatacgttttactactaagttttggaggtttttattatgcaagttacttttggaattgatgtaagcaagtctacttctactgtttgtgaactaattggtgaaagcaaaaatgaactaaccattactaataatcgtcctggttttattcaattgcttcatgaattaaccgctttttctaaacatccgcaaattatttttgaagctaccggtgtttattcacgcagactgcaggcttttcttgaagactacggctatgaatatgttgttattaatccgcttaaagccaaaaaagagatgaatatggggctacgctacaacaagaccgataaaactgatgcttatcatttagctttaattcaaagactttatcgccatccggttaatcaaagcgaatcccaaacttataagcagcttaatgctttgagccgcttctatgaccagctgacaagtgacttggtaatagctaaaaatcgacttcaccaagctctacaatcgacttttcctgaaattgaaaatttattttcttctgctaaaggtaaaaattactggcaaatagttgtgcgatatcctcattgtgacttagtaagaagagaagataaaaaacagcttattaactggttaatgagcttaaaggggattgcttttaaacacgctctaaggactgcagataaattaattgaattagcttatcaagcttatccagttgtatcttgctctagcatagaagtcgagcaagtgcagtattatgcacacagattgcttaatttaagtgatcaaagagaaaatttaatcgcaagaatggttaagttagcgaagtctttgcctaatcatgatttagaaaacctagaaagcattccaggctttgcacagaccactgctgtcagagttttagcagagttaggagatttacgcagatttagtaatcctaataaaatcaatgcttttatcggaattgatccaggcagatatcagtcaggagaaatggactctaatttaagtattactaaacatggcaatgcagtcgcacgtaagttgctttatcgagctattggacaaattgataatgcagctaagacaaatccgtgtcatatagcagattattatgaaagcaaaaagctatcctctcaaaccaaagggttcaaaaagatagctattgcttcaattcataaactaatcagaaccatttatgccctgattatcaatgatcaaccatatgattacaacgtagccacacataatcaaaaagactttagtcgtaattaattgatcaagtacattataacgctaagcccaaaaatcagatatggatctgggcttatttgtcgtgtctaactaaaaaaataaatcgacactaaaagatgtttaagttgaaatttaaacaaaaaatgaagccaaacttcttattatgcttgactttacgtagaaaaagacctaaaagtgtctaacttttaggtctcagttcaaattgatttaattccctctttttatttattctattttaagcaccatgatattgaacaagtgaataaatatcaacatcaggtaatttatctctaccgtgtaaatctggcaattcgatgtagaatgcggcaccaactaacttaccaccaaggttttcaattagctctttagaagctcttaaagtacctgcggtagccatcaagtcatcacagacaaccactctttgtccaggtttaatcgcatccttgtgcatttccaaactgtttgaaccatattccaaatcataggaagcacgttcaacttctcttggtaacttatgtggctttcttgcaggtacaaaacctaaacctaactcagtagctactggacaacctacaataaaaccacgtgcttcaggcccaacaattacatctgcttttttactctttgcatattccgctaattcatgagtagcggcacgatacaattcaccatcttgcaaaattggtgtaatatcgcgaaaaacaatgcctttgttaggaaaatccttaacacttgcaatatatttactaaaatcaactgccataagaagcataacctccaaaatgctctgtgtttgtgttcaaacgcttttgaccagtatattttaacaaattttaacgataaaagcactgaaaacagaatagttatctatttatttgtcaaattattaacatatgtaatcaaacgttgactaggcatagttcttagttgattaacaaatttaatctgagaagaagttcccattaaatatttagaagctgtcagcggctgttttttaggagaaggctctcctaccaatttaccttcatccaattttacaaagcctaattcaaagaaaactcgtaaaatgaaaagcacactatcataatctagtcccaaataaggtgcaactgtacggtaatctgctggctttaacgtagggtgactataaatatattttaaaacagcaccaaaataatttttagcgggaatttgttcaacaggcaattgatcaagcaaaaagcgtaaatagatttgttgataatctttctccaatgcagcatttaattcaatctgattgcgtggcacatctaataatgcaactgtttcaccagtttgatcataatctttaactaaagagatcttgtcttcatcgatctgtagtcggttgcgaacaatcggaatatttttttgatcaaataacaggtagcggtccgcgaaacccataacatatttctcttggcgtaagtcaacaactggcgttggcactgccaattttggtgaagcaaaagctagtccggtcatgattccttgtaaagaaacttgatttcgataagtatttaatgataattgaacaaaaatttgagaaataaacggcaaaagattattattcaaaaagcctttattaaatccaataactgataagttaccgccttttttagcaaccgtaaatttgacatgattcttatctttacccattttaaagaaatgagtgattgttggattagagatactaaagattggctgcgtgtcacctgtcccaaatggacctacttgattgatttgtgctagtgtctgcggagttaagccctgcataggcaattccatgtcatattttttagtctcaagaccaccttcaacatgaaagtcatcttcaaatttttcccgtaatggcgcaatctgattttcttctaatgataaaccacaggcaaaatcatggccaccaaatttggttaaatattgatccttgatcggatttaaagcatcaaacaagttgaaaccagcaaaggacctacctgagcctttaacctcacctgcatcatttttagtcaaaacaatcgtgggtttatgtgtcttttcaacgatcttattagctactaaacctaacacaccttcgtgaaattcagggtcatataaaaccaaagtattttgtttttgccagctatttttatgaattaacgtcatacatttgtcatagacttcggtggttaattctttccgtttattgtttaattcttcgatcttatctgcaattttttgggcctcaaggtcatcatcacttagcaaaagctcaactgccaagttggcattatctaatcgacctacagcatttaatcgaggagcaatattaaagccgacatcagtttcattaatactgcctaaagtcaaaccagcatttttgattagagcgcgcaagccaggacgatctgtctgattaagcatttctaaaccacgcttaacgataatatgcccctctccggtcaccttaaccatatcgccaatagttccgatcatagccaaatctagcagctcaggcatagtatcctgcattagaccacgacaaatcgtgtaagctactccggcaccacaataatcatcaaaaggatatttttggccaggataattacaatgaacagtagcataagctgccggtttcttttcttgaaaagtatgatgatctgtaatgattacatcaacattatgttcttgagcatatttgacttcctcgaccccagtaacaccattatcaacagtgataatcaatctggttccatcagctacaatatcttgatagcggtccatattaggaccatacccatcattgaagcgattaggaataaaataatgaacatcagcgcccaaaatgcttagggtttcagtcataatagtcgttgcagtaattccatcagcatcataatcgccataaattgtaatcttttcgccgctatcaattgcttgattaattcggttaattgccttatccatgtcatgcattaacgctggatcagccagattttcttctgttgcattaaaccaaaaatcaagtttttcgtctgtattaataccccgcaatgcaaaaagtttggctgcaatgggacctagttgatatttctcaatcaagtctggtgctaattcatcagctgttctttcttgccatttcattaattatcaaacaccttatgttctctcatcaaaacgaaaaggcactcattgttgagtgtctttattacaaaatctatttataattttatcgcaaatctaaatctgattaaagattgtaaatttttattttaatttaaaaaccttaagattattgttgttagccttttcagttttaatcagattaccccgaattgcccaacgattcttaccgccatcagcacaagtaatcaaagttacaatattcttcttagtattatcgactagccaaaccgcagttggatcaacaatctttttcatataaattcgatagacatatactttgttaagattagttaaataaactaactcaccttttttaacatcttcaagtggtgagaaaagaataccttttgctgtcatgtagtgacctgcaagaggataatttcccttacccattacttggtcggctcgcatcgtgccgccaccagtcgacattgcatcatcactcatccccaacataatcggtaaatacatattaacatcgggaatagctaacgcaccaatcgcaccagaagtctttttcacttgtgatcttgctgcttgtgcaatgcctaaagacttaactttactaaaatcatacattccttttttctttttgttttcttcaattgtctttctatttattccacttaaagtagattgttgattatgatgaattaattgatcactgatctgtttgttaaatatcaaagcaataccaacaagcaataatatgatagcagcaactctaagtaaaattgtacttacactattttttttatttttagccatttttatttaccgttgatgtcatcatcgttcatcttcaagactgccatgaaagcatcttgaggtacttcaactctaccaactgctttcattcgcttcttaccacgtttctgtttttcaagcagcttagcccgacgatctggatcaccagtatggattttccaggtaacatcttttcggtatggcttaattgtagctcgagaaataattttagctccaattgcgccctgaatatcaacttcaaagttttgccgtggaattagtttttttagcattgaagtcatttgacgggcacgatcttgagcttctgatctgtgagcaataaaactcaatgcatcaattggctccttgttaagcaaaatgtcgatcttaaccaaatcagtagcacgataacccgtaatttcataatcaagtgaagcataacctttagtcgaagatttcaaatcatcaaagaaatcaaaaataatttcagctaatggcatgttgtaaattacattaactcggtacttatccaagtaatccatggtaacgaattcaccacgcttacgttgacaaagctccattactggaccaacaaaatcatttggcaccataatttccgcttttacataaggttcttgaacttccttatattcaccagcatctggcaaatcagatggattatcaatcaccttggttgttccatcattcataattgcatgataatcaacagatggtgctgtcatgattagatcaaggtcaaattcttgctctaatctttcctgtacaacatccatatgaagtaagcctaagaagccacaacgaaacccaaagcctaaagctgttgaagtttcaggctcaaattctaaagctgcatcattcagctgtagtttttgtaaagcttccttcaaatcttcataatcacggttgtcaactgggtacatcccagaataaaccatcggtggaatttgacgatagcctggaagtggttcagccgttgggttatcagcttgagtaattgtgtcaccaacacgtgtttctcgaacggacttaatgttagcagtaatatatcctacatcccctgcgattaaaatatccttcttaattggatgaggactagaaacaccaacctctgtgacttcatattccttgccagtattcataatttgaattcgatcgcctggtttaatagatccatcttcaattttgacagacattaccactccgcgataatcatcatatttagagtcgaaaatcaatgcttttaatggagcagtaatatcaccagacggagctggaatatctttaactaccttttccagcatgtccttaataccttgaccggttttacctgaaacttcggcagcttctgaagcatccaaacctaacatttcttcaatttcttccttagtcttaggaacatcggcagatggtaagtcaatcttgttaattactggcaagattgccaaatcgtcatcaattgccaaataagtattagccaaagtttgagcctgtacaccttgagaagcatcaaccaccattaaagcaccttcacaggcagctagagaacgtgatacctcatatgaaaagtcaacgtgtcctggtgtatcgattaagtggaaaatgtagtcttcaccgtcttcagcatgatatttcacttcaactgagttcattttaatggtaataccacgttgacgttcaagtggcatatcatctaacatctgatttttaagctgacgttgactaactgtatcagttaattctaagattctgtcagcaatagtcgatttaccatggtcaatatgcgccacaatagcaaaatttcgaatgtgtttttgatagtcttttaatttttttaaatccataaaatcgttcaccctttactatgtattaattatagcaaagctagaataaatgatgaaattgtagcatagtaaattttcaataaaatgcagagtttttagaataataattgaaaattcagcattgaatattttccaagaaaaactctaaaaatcaccaaaaaattaattgatcttaaaaaaggtttctgttgcaagtagcagaaacctttttagcatttacatattaaacttatcttttaagcgttcaaaaaatcctttttcttgtggtgtaatattgccaccaccatcatgaacaaagttggtcaaatctttcttttgcttatcattaatgtgctttggaataacaatattaactgtagtaatttgatcaccattgccattaccacgaagatatggcacaccctgtccacgcaaagtaaacttcttattaggttgcgtaccagctggaatagttagctttacatcaccatgcacagtcttaacgttaatttcatctcctaaagtagcctgagcaaatgagattggtacttctgtataaatagtctggccacgacgctcaaaatctttagatggtttaattcgatagttaatatataaatcaccatatggtccgccatttatacctgcttcgccttggccttgatatctaagttgttgaccattgtcgattcccgctggaatatccacttcaatagtattcttacggtcaactgttcctttaccgccacaggttttacatggatactcaataatcacaccacgaccatgacatttgtcacaagtggtttgacgacggatcatgcccaacattgattgttgagtaattgtcatataaccagttccatgacatttatcacaggtaattggatgtgtacctttttcacaaccattaccgccacaagtttcacaagtttcgcttcgagtatagctgacctgggtctttttgcccttaatggcatccataaaatcaattgtcaattgataatccaaatcttggccacgttgtggtgcagttggatcaaccctctgttgacggccttgaccaaaaatatcgccaaagatatcgccaaaatcaccaaagccagaagtatcaaatccggcaccgccaaagccttgaccagctccaccaccaaagccaccttgaccatttacaccagcagaaccaaattgatcatattgcgcacgtttttgcttatcatgcaaaacctcataggcttcgttaacctgcttatacttttcttcagctccaggttcatggtttaaatctgggtgatattttttggctaatttacgatatgccctacttatttcctgatcactggcgtcacgatctacgccaagtactttatagtaatcttcttgtgccatctatttgaactccttgtattctcaaaagaaaagaactactcaatgggtagttcttttctccttttgtttaattataaacccattacttatttggatctactttgtggaattcaccatcttgggcattaccgttgttgccattatttgaattaccaccttgtgggccttgaggacctgcttgtggaccagcttgaccagcagcaccaccattttgttgatacaacttaacagctaagtcttgagcagccttggataaagcatctttcttttctttcatttcatccaagttgttgtccttttgggctttcttcaaagcttcaagagcatcttcaactggcttacgatcgctatcagagagcttatccttagtatctttcaaagtcttatctgtagtaaagattaattgatctacttcgtttctaaggtctgcttcttccttacgcttcttatcttcatcagcgtgttcttcagcatccttttgcatacgtttaatttcttcatctgataaaccggatgaactcttaatagtaatcttttgttccttgccagtacccatatccttagcagatacatttacaataccgttcttatcgatatcgaaggtaacttgaatttgaggaacaccacgtggtgctggtggaatatcagttaactcaaagcggccaagagtcttgtcgtctgcagccattggacgttcaccttgcaatacgtgaacatctacagctggttgattatctgctgcagttgagaagatttgactctttgaagttggaatagtagtgtttctgtcgattaacttagtgaagacaccacccatggtctcaataccaagtgacaatggggtaacatcaagtaaaacaatatccttaacatcacctgagataacaccaccttgaattgctgcacccatagctacagcttcatcagggttaattgaatggtcaggttccttaccagcccattccttaactgccttttgaacagctggaatacgagtagaaccaccatttaaaataaccttgtcaatgtcattaacagtaagacctgcatccttcaatgcattgtcaaatggtaccttagtcttttctaccaagtcagcagttaattcatcaaacttagcacgagttaaatctgcttcaaggtgtaatggaccagcttcgctagcagaaatgaatggaagtgagatgtgagtacttgatacacctgacaagtccttctttgctttttctgcagcatcctttaagcgttgcattgccatcttgtccttcgacaaatcaacaccattttcatccttaaagttcttaattaaccaatccatgatacggtgatcaaagtcatcaccaccaagatgagtatcaccattagttgacaatacttggaagacaccatcacctaattgcaatacagaaacatcaaaagtaccaccaccaaggtcgtatactaagactttttcatcttggtctttatttaaaccgaaggctaatgctgaagcagttggttcgttaataattctttgcacattcaaaccagcaatcttaccagcgtccttagtagcttggcgttgagcatcattgaagtaagcaggaacagtaataacagcatccttaacttcttcacccaagtaatcttctgagaatttcttaatatattgtaaaataaatgctgaaatttcttgtggtgtatattccttatcaccaactttaaccttataatcagcttcacccatgtgacgcttaattgaaacaatggtattagggttggtaatagcttgacgctttgctacctcaccgacttgaacttcaccatctttaaatgcaactactgaaggagtagtccggttaccttctggattagtgataatctttggttctttaccttcaagaactgcaactgctgagttagtagtcccaagatcaatcccaataacttttgacatatattagcttcctctcttattgagcaactacaaccattgctggtcttagtgttctatccttatattgatatcctttttgtaaaacctgaacaacgtgatctttttgatcatcattctcagctgctactgtttgaacagcttgatgtaatgtcggatcaaatttaacgccatcagcctcaatctcaactacaccgtgatctttcattgccttcacaagtgcatccaaggtcatttgcacgcccttctttaactgcttagacacatcatcatcggcctcaacgcttagggctctttccaaattgtccattgctggcaaaatgtccttcgctaagctttgagattcgtacttaattaattgagcacgttctttagtgtagcgattttgcatattttgaatttctgcttcactacgcaaatacttatcttcaagatccttgttcttatcttttaaatcagctaattctttagctaatttttgatcttgtttatttttttcttgcttcttttcttcacctttatcggcttcttttttagccttaggctcagaagtcttttctttttgctctagatttttttcacttggaaattcttctttactcacggctaacctcctttattgaaacttgccataataatcaagcaactttttagctagttcatttctaaaatattcaagcaacccaatcatttgtgaatatggcatattcgttggcccaagtaaagcaatagttcctttaccatgggagccaacgctgtactcagctgtcagcaaactataattttttaataaatcattgggtaattcagatcccaacttaacctttactgaataatttccagactttggatccacctttgcatccattaaattagtgaacagattattatgatcaatcaactcgtacaaagaacgaatgtcatttacatcatgttcagaagtattattgagcaaattaatctgtccatccacatacatctgctcactagctgcatcttttacgacatcttcaactaaactaagcaattcagtcacatgttcgccgcctaattcgtttttagctaattcacttagcaacgaaacgttgatttcatttaggctctttccgactaactgatcattaatcatgcggacagccttttcaatttcttcgccgtgaatattatgtggcaaagcatatacctgattttgaatgttaccatcacttgtaaccaaaattgccataatctgtcgttgagacagcggtacaattctaaatcctgtgactctaacatcatgactctcaggtccttccgcaaatgcggtatagttagttaaatctgacagaattcgtgcagcttcttgtacaatttcatttacttgatgaaaaggtcgatctaattggcttcctattgtattataaacagactctggtaattgcaacggctcaactaaattatcaagataataacgatagccctcgcttgaaggaattcgaccacttgaagagtgagttttttcaattaacccctgctcttccaacacggccatttcatttctaatcgttgcacttgaaactttaattggcaactgcttcattacggtctttgagcctactggctcatgactttgtgtaaagtctgtaattattgtttttaaaataagctcttgacgctcggtcaacatattatatcgccctcacttttagcactcacatctctcaggtgctaacagttaatatgataccagaaattagcactaaatcaagtagattgctaattttattcaaaaaatacgcacttttttcaaagtacgtagcttcttaacccttttgcttaaaataagccctaatttcttgctcatctcgttcaagttgctctttcagttcaggtaatccggcaaattttttctcacctctggtatatttataccatttgatcttcattggcttaccatagacatcttcattaaaatcaaaaatattagattcaatatatatcttcttgtcctgattaatggttacattatagccaacgctagtcatggagttataccacttaccatttactttagtcttggtagcataaactccaattttaggaatcaccttatgttctgcccaaatcaaattagctgttggatagcctagcttatgaccatttcgtttaccatgcccaatgataccactcattacataatggtgccccattaattcagtggctaatttcatctgaccatccttaattgcttgacgaatttcagttgagccaatttttctaccgttaaaagtttgctttggcatcactacaatattaaaacgccctttggaaaattggggtaaattagccatatttgcaatattcttagaaccataagtgtaatcaaagccagcaacaacggtatcagcatttaatctgacaattacattatcgacaaattcttgtgcagaaatttgactgaaatttttagtaaatggtaaaacagccaaataatctactcctaattccgccattttgttagctttttcttccaaagtttctaagtatttaaaatctcgtttcgactcataaacttccttaggatgtcgatcaaaggtcaacacaactaatgacaatttcttctgtaatgcaatttctttagcctgattaattaagcgctgatgtcccaaatgaaccccatcaaaaaagccaagggcaagcacaattctagtagataaaatattttccttaacaggatatgttaaatgaacgattttcacagctaattccttcatttcatttattcattttgcaacagcattaagcttgggcgataaagctttccttttttttcataaattgctttcacctttttattgtatcgtagtgcaacttttttcgcattagtttcaagcgaaatacccgctccatttttaactttaagccacttttcttcagttaaatcaacctgagtgtattccttaaaaaatgcatcaatcggctgtataagttcagtggcctttttcggattctcttcaatctcctttaattttactgcttgtgtaatatcaaagccagaactagctgttcttctcaaataagtcatcgttgcggggcaatctaatttttcacctagatcattaactaacgatctaacataagtgcctttgctgcatttaatcttaaaatcaaagctttcttgcccagtatttatatcaaaaactggttctttagttagatcatattgtttgacttcaacctttctctgaggtcgctcgacttcaatctcttcacgcgcatattcataaagatgtttaccattcactttaacagcagaataaattggaggcacttgaacaatttctcctacaaatttattcatattttcttgaatttctgcaccagaaaaaggctgaatcaactttttttcttttaaaacagttccagttgcatcataactatctgtgctataaccaaatagtcccgtgccaatatattcttttggcctagtatgcatcatttcaattaatttagtagcctgaccaatagcaattggtaaaacgcctgtcacctcaggatcaagcgtaccagcatgtcctatttttctaatatgtaatacgcggcgcaaatgataaactacatctgcactagtcatccctttatctttatcaataactaaaattccgtttaacataattattccctattcttttcaacaaaaaaagggcaccatcacggcgccctcttttttatttgctttcccgcttagcatcttgtttcttaacttctgcaatcaaacggtcaatcttactaccatacaaaactgaattatcacgtttaaaaattaattcaggaaccttataaacagttaatgtttgaccaagcaaatgacgcatcatgccttttgccttttcaaaacctgcctgaacctcttcttccttatgctcatcttcagttagcaggctgtaataaacagttgcatatgaaagatcattcgtacattcaactgcggtaatagttacaccacttaagcgcggatcacgaatattcttttgtaaaatcttggttaattcgcgtagaatttcaccttcaacacgaccaattctatgcttcatgttttcctcctaatagtaattacttaggctcaacttgttgcatttcgtaaacttcgaattcgtcgccaactttaatgtcgttgtagtccttaatcgttaaaccacaatcgttaccttgcttaacttccttaacatcatctttaaatctcttaagtgaagcaatttcaccatcatacttaacgataccatcacgaataactctaatcttagaatcattcttaaccaagcccttatcaacgaaggaaccagcaattgtaccaaccttagaaaccttccaagtttcacgaacagtaagattaccgataaccttttcttcataagttggttcaagcatacccttcatggcagcagtaacatcatcaatagccttgtaaataatgctgtaaagacgaatatctacgccatcggtttcagcttggctcttagcagtagcagttggacgaacgttgaacccaataataaatgcatttgatgcaccagccaaagttacatctgattcattaatggcacctacacctgagtgaatgatatttacacgtacgccttcaacttcaatcttttcaagcgattgttgtaaagcttctacagaaccttgaacatcagccttcaagacaatgtcaacttccttcatgttttccttcttcatagtatcgaagaggttatcaagagttacgtgttgaacattttcacgagacttttgtaaagcttgttgtgctctagcttcaccaacacttctagcggtcttttcatccttaaattcaactaacttatcagcagattcaggcacatcgttcaaaccagtaatttcaacaggttctgatggtgtagccttcttaacttgacgtccacgatcattagtcatagtacgaacacgaccaaaagtgttaccaacaacaatcgggtcaccaacattaagtgtaccttgttggattaaaacgtctgctacaggtccacgaccacgtgacaaacgagcttcaatcacagtaccaattgccatttcagttggattagccttaagttccatcacatcagattgcaacaagatcatttgtaataagtcatcaacattttgacctgtcttagctgaaatattaacgaagatagtatcaccaccgtaatcttcaggaatcaaattgtatttcattaattcctcagttacgtgttgtggatttgcacctggcttatccatcttgttaattgctacaattattggaacattagcactctttgcatggtcaattgcttctacagtttgtggcattacaccatcatctgcagcaacaaccagtacaacaatatcagtaatttcagcaccacgtgcacgcatgttagaaaatgctgcgtgtcctggtgtatccaagaatgtaattaagcgatcatctaatctaacttggtaagcaccaatcttttgagtaataccaccagcttcatgagctgaaacatgagtatgacgaagacgatcaagtaaagtggtcttaccatggtcaacgtgtcccatgattgtaacaactggtgggcgtttaacctggtttttagattcctttgactcttccattctcttgtcatagatattatcaatatcagagatgtcttcatgaactttttgctcagcattgataccatattcagcagctaaaagttcaattgtatctttatccaaagattggttttggttagtcatcacgccaagcatgaagagtttcttaacaatttcagctggttcacggtgaattaacttaccaatatcttgagcgttcataccttcttcgtaaactaatgtttctggtaatggacgttccttacgcttagtaagtgttttctttggcttttgctcttgttgacgttttttattcttacgccgctttctctctgaacgatctgaatggtcactacgaccattgccaaattgatttttacccttgcgtcctggctttcccatgttgcgaccacgattattgccgcgtttttcttccttaggagcctcaggaatagtaacttgaactagttctttagtcgcttcaggctgttgcttcttcaaacgagctggagaaggctttaaaatcttaggaccaataactttcttttctactggttctgctttcttcttgttatctttgtggttgcttgttttcttattatctttcactggctgttcttgttttggatgtcttaattgctcatgatattcttttctggctttttgggcttcacgattaagttgcccttcttctgcccgttgcttttgtttaaattgttgtaacaaagcagctgcctttggcttacctgtattatttctacgatcatttttattctcatgaccgtgattatttgaacgacgtttattattgcgtctcttagaattcttagaactattattatcttcttgcttcttttcatttttgcgaatagaagaaacagagatttttattttattctttttattagaagattttgcagcaggagcggagttttggaaactattctttaactttgcaacctgtgaatcatctactgatgacatgtgattctttacatctaagcctaaatcctttgctttttggactacaactttgttatcaacgccgacttcttttgcgatttcataaattcttttctttgccatccaatcacactccttcatttatttttttaactaacgccttagcaaaaccagcatcagttaatcctaaaactttgcgttttttgccaattgcctttgacaattcaatggcagtaaacatagttatcataggaatattgtcttttctggcagcgcggtttactttttctgccgtgttgtcttgaacatcactagccataataaccgctttgattttgtgcttattaagttcattaatgactgtctctgtaccggtagttaacttaccagcacgctcagctaaacctaacaaattaattgctttttgtctattttgcaatcttatttatcaccaaataattcttttcttgccttttgatgatcaacataagagtaaagctcatcgtaaaaagtatctggaactttcgcacctaaactacgttctaatacattcttctctttagcagcttcaatcttacttggatcaagggaaacatatgcgccgcgaccagcctttttacctgttggatcaactgacacatttttttctttatcgataacaatacgtactaattccttcttgggctgcattgtatcggttaataaatccttccgcattgggatttttctttttttcaaaaaatcacctattcttcagttttatcttctttacttgaatcttctacagtagttgtatcatctgagctttcaacgtcagcagcgtcatctgtactttcaacattttcagaagtttcgctactatctgcagcatcagctgtatcatttgttttttcatctacaaattctacttcagattcaggacgaatatcaatcttatagcttgtcaaacgagcagctaagcgaacgttctgacctttcttaccaattgcaagtgataactggtaatctggtacgataactaaagcacttttttcttcttcatcatcaccaaattgaaccgcaatcacttctgctggatttaatgcattagcaataaagtcagatggatcttcttcatacttaacgatatcaatattttcaccgccaagttcgttaactacattttgtacacgagcacccttttggcctacacaggtacctaccggatcgatgttaggatcatttgacttaacagccatcttagttctgtcacctgcttcacgtgcgattgaaacaatttcaacggttccatcataaatttctggaacttcttgttcaaacaatcgtttaaccatgtcaggagcagttcttgagactgtaatttgtgcacccttgctatcggagccaacatgagttactagtacacgaatctggtcttggggattgtaaacctcatttggcatttgatcacggtgaggcataacagcttcaacattaccaatctttacataaacgaaacgattgtcgcgtctttccacggtaccagtaaccaattcatcttcatattgtgaatattcatcaataatatgttttctttcggcttcacgtagacgttgcatgataacttgcttagcagtttgggcggcaattctaccaaaatttttaggtgttacttcaaaacgaatttcgtcgcctacttcataagcacgattaattgttaaagcatcctttaaactaacttcaagacggtcatcttgcacttcgtcaacaacagttttaactgccattaccttgaagttaccttttctttcatcaaaatcaacttcaacgttttgtgcttgattataattctttttgtatgcagctaccaaagcggctttaattgcatcaacaataatatcttgcttaatgcccttggtattttccaaagtagcaaacgcttctagcatttctttagacataagtttttgatcaacctttctaaaattcaattgcaaaacgaatatttgcaattaacttacggggaacagttaatgtttttcgtcttgtcttatcttttatttctaatacaacttcgtcatcattataagacttgagtgtaccttcatacatttttttattctcaatcttttgataaagaccgacatgaatgtaatcattcagagctttttcccaatcagcttttgttttgattggtcgttctgcccctggagatgataattccaaaacatagggatctggaagtggatcgggatcaagagcatccagcttttcggaaacaagttcacttaaagctgcaatctcatcaatgtcaataccgtttggttggcgatcaacataaatgcgtaaataattttgccctttttctttaacgtattccatatcaaccaacatgtcaccatgttcatcaataattgtttcgacaactggacgaacagaatctataactttagacaaaaattttcctccgtaataaaaagagtgagcatcactgctcactcgaatttacctattcgaacttcatacgtagtataccatgttttacctgatcttgtaaaatttaactatcagaaaagtgataattgattttcatctggcatcccttccaagacaccattttcttcgaaataattcataattgtttgtgatactttaccgcgcttagctaaatcttctttagacaaaaacttcttttctgcacgagcagctacaatctgcttagctgcattatcccccaaaccaggaacagcattgaacggtgctaaaattgtatgcttatctaagatcttaaagtcagttgcttcagattgatcaatatcaaccattttgatcttaatccctcgttctagacattcattagctatttctagcacggtcatcaaactcttatccttagctgatgcatcgtttcctttatcctgaatttccttcattgcagccttaacagtattcttaccatgactcattgcaaccaaatcaaatagatcggcacgaactgaaaagtaagctgtgtaatagatttcaggataatatactttaaaccaagcaattcgtagagccattaaaatgtaagccgtagcgtgagccttagggaacatgtacttgatcttcagacaagaaggaatataccaatctggaatattcttatttttctttaaaatagccatattttcatcgctgatgccacgaccatgacgaacggattccattgttgaaaaggcaacttctggcttaacgccccagtgaattaagtccatcatgatgttgtcacgacaaccaattacatttttcagtttgcaaattccttgattgattaagtcctcagcatttcctagccatacatcagtcccatgggacaaacctgaaatctgtaataattcagaaaatgtcgttggcttagtctcctcaagcattcctctaacaaaacgggtaccaaattctggaacacccaaagttccagtttctgattgaatctgctctggagtaacacctaaaatatcaggactagaaaataatgacatgactccagggtcatcgggtggaatagtcaatggatcaatcccagacaaatcctgcaagtgacgaatcatagttggatcatcatgtcccagaatatcaaacttcaaaatattatcatgaatagagtggaagtcatagtgagtaatcaaccaagcggcatttacatcatcggctggatacgataccggcgtaaaatcgtaaatgtccatatcatcgggcactacaacaattcctgcagggtgttgaccagtagttcttttgacaccacggacaccagctgccaaacggtctaattccgcatttcttagctttaaatcatgctcttcatcgtagtgtttagcataaccgtaagcagtcttatccgcaacagtcgcaatcgttccagcacgatatgaattatctggtccaaacattactcgaataaaattatgggctactggttgatagtcacctgagaagttcaaatcgatatcaggaaccttatcgccgtgaaatcctaagaaagtcgcaaatgggatatcttgtccatctttaactaatggagttccacattttggacaatctttatcaggcaagtcaaaaccagaaccatattccccattttcaaagaattgtgaatacttacagttaggacaacgatagtgtggagctaacggattaacttcagtaattcctgacatcgttgctactagactagagccaacagaaccacgagaacctaccaaatagccatctttatttgacttagctactaaacgctgagaaatcaagtaaataaccgcataaccattcgaaataatggaatttaattccaaatctattcgatccttaacaatcttcggtaatggcttaccatataattcataagccttatcataggtcaacttcttcatttcttcatcggcatgttcaatatgtggtgggtataacccatctttaattggctgaatttctgacaattcatcagcaattttattggtattgtcaataacaattttcttagccacatcttcgcctaagaatgaaaatgcatctagcatttcctgtgttgaatagaaatgcaaatctggctgtggcttatttcgactagggtttgatctctgagccgcaatcaagattttacgataaatagcgtccttttggtcaacgtagtgggcatcgctagttgcaactacaggcttatttaattccttccctaatttaataatattttcaataatttcatgtaattgatcttcatccttaatcaaaccatcagcaattaattgcgaataggttgctggaggttgaacttcaagataatcataaaatttagctttttctcttgcttcgtcgtaacctttttgcatcattgcgataaagacatcgccttgccaacaaccagaaccataaagtaaaccatcatgcaaacgagccaaatctgacttcggcgtacgaggaatacggaaaaagtccttcgtgctggcaattgatactaatttgtaaagattctttaatccagcttgatcctttgccaaaactgtcatatgggaaggacgggctcgtttataaacttcaccatgtgctgcatagccattcaaattattcaaattattttcatgatactttttattaaaagcatctaacaatttaaacattaaatagccagttgcttcagcatcctgatttgcccggtgatggtgttccaaggaaacattatacttcttagctaatgaatctaaagtatggcgactctgctctggatgtagtaaacgcgatacttcaagtgtatcaactactggctgagtaatttcttttagccctgcacgtcttaatgctgcattaacaaacccaacatcaaattgaacgttatgtccacacagtggtcgatcgccataaaagtcttggaattgcttaatgacaactgcttcatcatcggctgcgccaaccatttcatctgtaattgaagtcaaattaatagtttgctcacttaaaggatggtgcggattaatgaacttatcaaagcgttcaagcacttctccgttcttcatcttaaccgcaccaatctcgataattgtgtcgtaaacagatgacaaccccgtagtttcaacgtcaaaaattacaaactcgcggtcttcataggtcatcggtgcaggattcaaaactagtaaagcatgatcatcaatcatattagcttctacaccatacaatattttcatgtccagtgctttaccactgctatatgcttcagggaatgattgaacatcaccatgatcggtaatcgcaattgccttttgtccaaacttcttagcagttttaataaagtccgtcggagtattagttgcgtcaacctgactcatattagtatgaacatgtagttcaactcgtttaggctcaccttcgtatttttcagttcgcccaacatgctcgacagtctctaagctactaatattaaaaactacatcatgtatatattgatcatcagcaactgacccctgcattttagcccaagttcctggtttaattgcagatagctcttcaatttcatctttattagaaacaaatttcttaaatgcaattgaatcactataatccgtaatttcgccagaaaaaatgattgcaccagatttaagctcacgagtttcaacattaaaaatatttccctcaattactacattacgtacgccatcttccagctctttaatttgtgtaattggagcattttcatctaatttacgtttaccataattagtacgtctagttggatactgtttaggttgttgcggtttaggtttgtctggcgtcttctcaaagacttcctgcatgcttttttcatgctcttgttgcaactcctgcaaactttctaaattgtttttagaacttgtctgatccagctgagttataaatttcaaattaaagaagccataatcacgcatcttttcagctaaatcatctaaagccttctgctcaattaaaccatcaatcacattattatcaactggaataacccagcggccatcaacttttttaggtttttggccagccaaaaattcacgagccacaggttgcaaaatatttgaattttgaactacataatgccaataatctggtaaatattgatcagaaccatcagctgttccaacataaaatcttacatttacaaaagaagaaaaagtttcttctacagcttttcttaatgctacataggtgtcatacatcaagggagtatcaaaaaaaacgtggatatcccacctgtgttctttagcgtaaacatccacgttttcaattttccctttttgtagaagcgcattgtcttcaaaactatcaggaaattgaacctgtttgagcaattttaagaaaagatcgtttttatttgccacaaaaattatcctaactcttgatttacaaacttatctaattcatcaattgacatttcggttgctttgtcatcagttggtcgcttaacttcaacaatgccatcagcagccttcttaccaatcgtaattctaattggtgcaccgactaaatctgcatcagcaaacttaacaccagcacgctctttacgatcatcgtataaaacatcatacttttcactgaatttcttttcaagtttttcagctaattcagtttgatcttctttattcatcttcatttgaacaatatgtattgcaaatggagcgatttcctttggccatgcaacaccacgttcagttaagtgttgttcaacagctgctgataacattctagtaacgccaataccgtatgaacccatgatgacaggctttgctttaccattttgatctaagaaatctgcacccatggtcttagtgtaataagtacccaacttgaaaatgtgaccaacttcaattgaagtagtgaacttaagcggtaaatgatcaacaggatctggttcaccttcgttagcagtccgaatatcagcaaattcatccaccttgaaatcacggtctaagttagcattttcaaattgataatcggtttcacctgcaccaactacaacgttgtaaagattcttaacagtttcatctgcaataatcttatcagcccaatctgcattaacaggaccaacgccacccttttcactaccagtgatttcctttaaatcagcagtatttgcttcatgaacctcatcagcgtcaaggatatgacccaacttaacctcattaatttgcttgtcaccacggattaatactaaaactttttggtcatcagcaatgtataaaatacttttaacaattctagtagctggtacatcgaggaatttagctaatttttcaattgtatcgcagcctggcgtagctaccttagttaattgcttagcatcttctggttcttgcttgaaagtatcaatactcttagccatttcaaggttggcagcatatgttcctttttcattagtagcaattgtatcctcaccgatagcagcaggggcttgaaattcagtagagtttttacctcccattgtacctgagtcagcaattacagggtgaacagtaacaccggcacgtttaaagatacgcttatatgcatttttttgatcatcaaattgttcatccaattgatcacgagttgcagcaaaactgtaaccatcaagcattacaaattcacgcccacgaagaaggccaaaacgaggtctattctcatcacgaaacttagtctgaatttgatacaaagcaagtggcatttgtttgtaactctttaagttcttagcaataatttcggtaaaagtttcttcatgtgtaggtccaagcaagctttcacgtccatgacgatcttttaacttgaacatttctgcaccatatttcttgtaacggccactttcttgccacaaagttgcaggaagtaaatgaggcataatcatttctggaacattaattttatccatttcttgttcaatgattccctcagccttgcgtaaaacacggtagcctaatggaagataagcataaactccagctgtgacttgacgaatatacccacctctaatcatcagcttatgactttcagccactgcatctgatggtgcttccttcaaagttggcataaaaaattttgattgacgcattcttatctcctaaagtaaaaaatataattatttaataaaatagcgatagatatcgttacctgtaactgcaataattaaaactaataataagccgaaaccaattaattcaacaattgcctcatgttcttcagaaatcggtttaccgcgaactaattcaattaagttcaataaaagtttaccaccatcaagcccaggaattggaattaaattgacaattcccaaattaatcgaaatcattcctaaaaaggctaatacataagtaaagcccatttgtgaaacttgtgaagtttgagaataaattccaactggacctgataatttattcaaactaaagtggctaaataagttacctacggctctgaaaatcagaccggtagttgaaatagctgtatcccagccacgttttaatttaacaactgcattctcattgctcttagctacaataccaatttgataaactgtttgtttttgaattttatgagcttttggcttaactgtaactttcctaatttgaccatttttctttaattcaaagtgtaagaccttgcctttactttgattaatctgctgtgacacttgatcaaaattattaatcttttgtccattaattgccacaatctgatcaccagtcacaatttttgcatcacgcgctggtgaattagcctgagttgatccaactgtagttgttgctggacctggaactgtaaatgtccagattaaaaatactacaaacccaagaagaatgttcataaaaggtccagcaaaattagttgccaacttttgccaaacattagcttgattaaattgtgtatctcgaggcgcaataattaattcagttccgtttttttcaataatagttgcatcatgagctacgtgataagttactggatcattttcatcgccattttcgtaacccttaattattaaatcgtctactagatcagcctttgttacttgaacgggaattccttcaattggtatttcgctttctgaagcatcaattctcactacttcattttgttcattcaattgtaaaacaaccgtcataccaggatccagcttgctttcatcgtcagcgcctgctaaacgaacatacccaccaagtggtaaccaacgaatggtataagtggtggggttacgtctaatttgaaaaagctttggacccattccaattgagaattctctaaccaaaatacctgactttttggctacgataaaatgcccaaattcatggacaaataccaatataccaaagacgacgataaagattagtatacccttcaataaaaaattctcctaatgaacaatacctaaaattgtagccactactggcaatacaaacagcatactatcaaagcgatccaggataccaccatgacccggcaaaatctttccggaatctttcacaccatagaaacgcttgtaagctgattcaactaaatcacccatttgaccaacaattgataagaaaaaggccagaataatcatcgttaattcagatacaccaaagttaatacccaagctgccaagaattgccatatagatggcactacaaattaaggcacaaacaactgcaccgatcgagccctcccatgttttattaggactaataactggccataatttatgttttccaatcttacgtccaatcatgtaggcaccgatatcagtggaccaaacaacaacaaaaacacaacccagcaatgctaaaccgttttgtgggtatgctctaatggctgccatatagtgaaaacctattccaatgtaaagtgcagccaaaatatatacacctacatcatcaaaagtggttttattctttgaaagaacagtccaggtcaagaacaacataataattccataaaacacacctaatttagtgatatttgaaggaaatactttaaagaatgagtctggaactgtccaggttaaagttgcaagtaaggctaacaaaaaattaaaagaaactaagatttgtttcttcattaaaaagatttcgctaatgccaactgctgcgaataatacagtcagccaatccatccaaaggccacctgcgagcacaattggaataaaaagacataaggcaataattgccgtaattgtacgttgtttcatatttaactatccgattcgtctactttaccaaagcgccggttacggtgcttataatcttctacaaatttttttaaatcattttcatcaaaatctggccaatttttttcgctaaaggcaagttctgaatatgctaattgccataataagaaattagaaattcgctgttcaccggacgttctaattaataaatccggatcttgatatggaccaaagtttttagtcatcaaatggtctgaaatcattttttcagtaatttcttcgctttttagtgaaccagcttcaatcattccaccgagctcctgcatagcagacgtaatttctcttcttgacccgtagttaaaagcaaaattcagaattaagcctgtattattggccgtctctgacattgcacgttgaacaatgcgataagtcttttcaggcaattcatccaaatagcccatgatatttaccttaacattattttccatcaatgttggcatgtatttatcaaaaaagcgaacagggaggttcattaagtaagctacttcttctttaggacgagcccaattctcagtagaaaaagcataaagtgtcaaaactttaattcctaatttatcagcagctaaagtaatccgctcaacattatccattccctctcgatggccaacaaaacgaggtctatgcctcttttttgcccaacgtccattaccatccataataatggctaaatgatttaattcattatccttattactcatctttaaccttgagtaatttccttacgcttttcatcagcaagttggtcaatctgcttagcagcatcatcagttactttttgtacttgcttttctaagttacgttgttcgtcttcagtaatatcaccattcttttcatcttttttcaaagtattcatggcatcacggcgaacatttctcacagcaattttagcttcttccgcaaattttccaacttctttggcaatttcttctcttctttcaccagtgagttgagggattactaatctaattaccttaccatcatttgccggagttaatcctaagtttgaagccaacaatgcatgttcaatatcatctaatgaattttgatcatatggagtaataagcaatacacgtggttcaggaatggtaatactagacatttgagtcaatggagttggtgccccatagtattctacttggacattatcaagaagagcagcgttagcaacacctgcacggatagaagctaatctcttttgataaaccttaatagaatccgtcattttagtttttgctttttcaatagtttcgttattcattatttatcacctctaataacagtaccaatattttcacccaatacaaccttcttgatattgcctggagtattaacgttaaagacaattaatggaatttcagtatccattgaaagtgaacttgcagttctatccatgaccttcaagtcttttgaaattaaatcaagttgagttaattctgagaacttagttgctgaaggatcagtctttggatcagctgagtaaacaccgtcaacaccgtttttagccatcaaaattacatcagcaccaatttcagctgcacgaagggctgcagtagtatcagttgagaagtatggattaccagtaccaccaccaaaaatgactacacgacccttttcaaggtgacgcaaagctcttcttctaatgtaaggctccgcaatctgtctcatttcaattgaagtttgcattctagtaggaacacctattttttcaagaccatcttgcaaagctaaaccattcatgatagttgctaacatacccatgtaatctgcttgagcacgttccatacccaacttagcgccagtttcaccacgccacatgttaccgccaccacagacgataccaatttcaacacctaaatcatgaactgatttgatttctttagctaagtgaccaattacagtaggattaatccccgtacccttgtcacctgctaaagcttcacctgatatttttaaaatgacacgtttatatttaacttgactcataatgacctcctctaatagctttaattattctaccatatctaatgccgcaatgtcttttaacacttaaaacactacaaaatttttacaaaaaaagaaggagcacacggtgtactcctcctttctatgataattatgtaataatgactacttcatttgttcacgaacttcagcagcgaagtcttcttgcttcttttcgataccttcgccaacttcgtaacgttggaaagcaactaacttagcgcctttttccttcaaaaattcgccaacagtcttgctatcgtccataatgtagtcttgtgataacactgcaaattgcttgtcaacttgagtattatcatcaataaagcgttgcatcttaccaggaataattctgtcccaaatcttttctggcttaccttcttctttaagttcagccttgatgtcttccttagccttagccaaaacatcatcagttaattgcttagctgaaccgtaaacaaggtgaggtaatggtttcttatgtaccaatgcacgactttcattgtcttggtcaatcttgtggttcatcacagctaattgatcagtgataaattgatcatctaattcgtctggtgaaataaccttagggctcatagcagcgatgtgcatagccaagtgcttagcagttgcagcatctgcaccttctaaaacagtgataacaccaatttggccaccattgtgttggtaagcaccaaattcttggtcgtcattcttttcttctaaagcaaaacgacgtaaaacaatcttttcaccaattgtagcagttgcgttaacgaatgattggtctaaagtagtaccatcagccatcttcaattccttagctgcttccatatcagctggcttaccttcagcaatagtcttagtagcttcatttaccaagttaacaaacttgtcgttttgagaaacaaagtcagtttctgagttaacttcagtaatagctgccacattaccattaacgtaaacgccagttaaaccttcagctgcaacacggtcagccttcttagctgccttagccatacctttatcacgaaggtattgaacagccttatccatgtcaccgtcaacttctactaatgccttcttagcgtccataacgccagcaccagtacgttcacgtaattctttaactaattttgcagtaatttgtgccattaatagatcctcctacggaactaatagtaaaatctagtcttctgggttttcttcagcgctaacgatttcttctgaaccgtctgcattttccttgaagtcaacttcaactgattcatcatcttgaccttgttgaccttcaacaacagcatcagccatagcaccagcaatcaaacgaatagcacgaatagcgtcatcgtttgatggaataactacgtcgattgggtctggatcagtgttggtatcaaccatagctacaactgggatacccaaaatgttagcttcgtgaacagcaatcttttctttcttagggtctactacgaacaatacatctggaattcttggcatatcttcaataccaccaaagaatttttcaagcttgtccatttccttagttaagagagcaacttccttctttggaagaacatcaaaagtaccatcttctgacatttgctttaattgctttaatctcttaatacggctttgcatagttgaccagttagtcaaagtaccacccaaccaacgttggtttacgtagtattgacctgcacgagttgcttcttcagcaattgaatcttgagcttgcttcttagtacctacaaataagaaaacgccaccgtcttgggcaacagccttcataaagttgtaagcatcatctaacatcttgatagtcttttgcaaatcaatgatgtagataccatttctttgagtgaaaatgtaaggagccatctttgggttccatcttctagtttggtgaccaaagtggacaccagcttcaagcaattgcttcattgtaacaacgtctgccatatttaaattcctcctatggttttatatcctctcaagcgttcatttcatcatctaaccactaccctgggcaccacgatgatgattgctcttgatgtgttttaagtttcatatgctgacacagcatactcaaatattctacaagaaaagattacagtatgcaaggattaaaactttatattatgctcatgcaaaaatttttccttccaagcacgtgaatgatgtttaaaccaatattctcgtttcaaagctaaacgcttatcgtcaaactgttcatgataaatcatccgtacaggacgccgtgttttagtatacttagctccttttcctaaattgtgcattttcaaacgatgttctaaatcattagtaaaaccaccataaaaactgccatcattacacagtaagacataaaagtaatatttaccctgtgcttcatgtttagctttgtcatctgcagtttctcgtgagattcgctgtactaatggagtgaagtcgccatttgattcatgaacttcaacagcatctttcaaaacagttccatcagttccagtatgcttgacggcttctacaataattaaattagcatcttcaccgcgatgtggcacaaatggctgcaccattttgatgcttaagtcatgcttcatacaataataagcaatctcacctaagcgctctggccgatgtaccattaacattttgcctttcattttaagtaagccactagccacttcaattatttgctctaaattaatcaaaagttcatggcgagcaattgcttttttacgatctggattaacttcatgtcccttaggtgctttaaaatatggtggattaactgttactacatcataactatctttccgcaaaaaatgtcctgcatttagcacattatcctgaaaaactgaaatacgattttccatctcattaagcttgactgaacgaactgcttgagaataaacttcgttttgaatttcaattgcatcataatgggcacgattaaaataagccatatagattgtagctgcacaatttcctgcacataaatcagcaaccttatctttatcacggatcaagtctttagcccaatatgctaaaaataatgtatccattgaaaaactaaaagccgttttatcttgaataatacgaagattatcgctatacatgtagtcaattcgctcattatctttcagatctaccataaaaatatttgcctttctcgtcattatatttttataatagcttacatcaaatgaaggaatcaatgaggagacaatgttttacaaaattatacgtccgattgtccgtttcatcgtttgggtgttaaacggtcatctacacattcatcataaggatcgcttgcctcagggcaattatattttagtagccccccaccgtacatggtgggaaccactgctttttgcactaggtgctagtccaatggaattcatgtttatggctaaaattgaattattcaaaaatccggttttacgatttattcttgatcatgctcacgctttcccagtcgatcgaaataaccctggaccatcagccttaaagattccagttaagggacttagagaaggaaagttatcattaattatctttccttcaggcacgcgacattcagctgaattaaaaggtggagttttattaatttccaaaatgtcaaaaaaaccaatggtacctgttgtctaccaaggccctttaacttttaaaggactgcttaagcgcaagccattagaagttaactttggtgatccaattaccattgatcgtaaaactaaactaacccatgaaaatgaacaaattttatttcaacaacttgaagatgcttggaacaaattagataaggaaatggatccaaatttccactacgttgctaaataagtaaaaatcagtataaaacaaatattgctttatactgatttttctttacctgtgcaatttaatataagtgttaaaataatttttaggttttaaatattggaggaaaaagcaattgttagaaaaaactttttacaaaatgatgcttagtaaatctttccccttttctgttaaggtaacctactgggacggtaagagcgaagtttatggcaatggtgatcctgaaattgaaattgtttttaatgaaaagattccaatgagtgaaatcactcgaaatgcttctctagctttgggcgaaggattcatggataaaaaaatcgaaattcatggtaatatccaaaaattgcttgttggtgcttatgaaagtgctgattcattcatgcgtgcttctaagttccgtaagtttatgcctaagcaaaaacacacggaaaagcaaagcgaagaagatattcaaagccactacgacattggtaatgatttctacaagatgtggcttgacccaacaatgacctattcctgcgcccacttcgaagatggcaataaagatgatcttgaacaagctcaaattgcaaaagtacatcatatcttaaacaaactccacccacaaaaaggcaagaccctacttgatatcggatgtggctggggaactctgatgcttactgcagctaaggaatacggtttaaaagtcaccggtgttaccttaagtgaggagcaatttaaattagttcaaaagcgaatctacgacgataacttacaagatgtcgcaaaagttagattacaagaccaccgtgaacttggtgatcaaaaatgggattacattacttcagtgggaatgtttgaacatgttggtaaagaaaacttacctaaatactttgctgatgtctacaagtaccttaacaaagacggtgttgcattaatccatggtattacccgtcaacaaggtggtgccactaatgcttggttaaacaagtatattttccctggtggctacttaccaggcttaccagaaattgttactgacatcatcgattcaggcctacaaattactgatatggaaactcttcgtcgtcattatcaaagaaccttggaaatttgggataagaactttaatgccgttcgtcctgaagtagaaaagaaatttggtgaaagattctgtagaatgtgggatatgtaccttaatgcttgtgctgctagtttcgagtctggtaacatcgacgttatccaatacctattgacaaagggaccatcaggtaaaactttaccgatgactcgtaaatatatgcttgataaataattacatatcaaaaatagtcactagaaattgaaatccagtgactatttttttattcaattttaccaaatagtaatccgttcttctggatcaagccacatgccatcagttggcttaacgttaaatacatcatagaatgcattttgacattgaaccggaatgtttactctcgttggttgtggcgcatggacatccgtttgaacttcagtcttaattgcctcagggcgttgtttctgcatccagctacgagcataattctcaaacaaatctttcaaatccgccccatcattttccccagtttgaactacacaagcaaggccagctagatcagcaatattttcaccaacaacctgcttaccattaatcttagcaggaccatattgtaagccatcaaaaatatcaaccatttgaccaactcgtttattaaactcagcaaaatctttgtcagtccaccaattgttcatatttccatgttcgtcgaattttgctccactattatcaaatgcatgtgatacttcatgcccaatagttgcaccaattccaccataatttgcaccacgagattgattaatgtcataaaatggtgcctgtaaaattccagctggaaaggttaagtcatttctttgcggatcatagcacgcattattcaaattacctggcattagccaaactgaacggtcaactggcttagttaacttattaagcatatatttcgttcgtacagttgacattgccgcttcattttcatacaagctctttttcggatcaacttgtaataagtcaaagatttcttcgatcttgtctgggtaaccaatttttaaaaccaacgcctttaacttaatcacagctttctttttggtttcagcagaaagccatttattagcattaattctttcttcatataccttaagcatccgttggatcatgtcttcaacatcttttttggcttttgccccaaaatatttttgtccataaaagataccaactacttcatcaaaagcaccattagccaaacgataagcttgcttaatttgtgatggcaattgtggcgtaccagtaactgcttgaccaaaaggaaacgcagcttcacgaaaatcttgtgacaataatttagctacgctgttaatgtatttaactagcatccatcctttaatctcagcaaaattcccttcattcaataattcttcagcatgattgagaaaacgtggttccataacgataattcgatctggcttaaccggtaaaatagaatccatgaaatcagccatgtcaaatgatttaaattttttaataaagtcagcatatgttactggattataaattgcggcataatctgaccattcctcagttgacttaactaccttagctaatttttgatcaaaggccaaagcgctttcaacataaactcgtgcttcgcttttaccaataccggacattgtcagtaagttaatactttggtcttgaagagtatccaaaagttgcttagcatcagcagtttgatacgtcgtagtatctggtaagaatgtgcttgggccaccaaaatggagtacgtttacatcagtgttcttcatatcggcatcgacgtcaaatacaaacggtaaagcatatggtcccataaacaaatcggcagctttttgtttaaaatcattaaaattatttaaggatattaatttttgtaaatccttttgaataggattagctttttctgcatccctcttagcaaaatcttttgcaatcttatacaaaataactgccttatcaaagtctttaatctcaggcatcttttctttgcccgccgcaatgtccgcaaagtctttcattactcgatcttcgattttttggtcaagctctgaattgacaccagcagatgtcttatcagcaggaatttctgctttagatagccattctgagttaacagccaagtataagttatcttgtggcttagcatttaagtctggcttagaaacgtcgccagctccaccacgaactgtaaaatatcttttcatttttgctccttataaatattcataattatttaatactttttaactattatatcaaaaaaagacgttgctactacacaaacgtcctgaaaaacaattagtttttattttcattattttgcaaggtatacaaattatagtaataacccttttgtgcaagcaattgatcatgcgtaccccgttcaattatgcgtcccttgtctaaaacaataatttgatccgcatcggcaatcgtagaaagacggtgagcaatagctaatgtcgttcgaccctttctcagccgctttagtccttgctgaatcaaagtttcagtctcggtatcaacatttgctgttgcctcatctaaaaccaaaatcttaggatctgtgactaaagttcgagcgaaagaaattaactgtctttgtccctgactaaattcttctccgccttcaatcactttagcatgatacttacccggcattctttcaataaagcgatccgcttggactgccttagcggcgtctttaatctgattatcagtaatttgattattatacaaacgaatgttagatgaaatatctccataaaacataaacagttcttgcaataccaagccaagtttttttcttaattcttctttaggatatttacgaatattaacgtcatcaatcaagatttcaccttgaccgaattcgtaaaaacgcatcatcacgttaataatcgagctcttccctgacccagtatgaccaacaattcctaaagtttcacctggattaactacgaaagaaatatcatgtaaaatttcatgcttgccatcataagaaaagcttacatgtttaaactcaatttttcctttagtaatcgtcaatcctttttgagcatcctgctgtggttcatattgggtatcatcaagaatccgaaaaatccgctttcctgcaacaatcccatcttggaaaaaggtcatttgatccatcacagttgaaataggattaaaaagttgcgaaatgtattgtgaaaaggcatagactacaccagctggaacaaaagtttcacgtaatggaaaaccaaagtacattaatgaaatggctaaagctaacgaataaagcagcgatgtcaatggcgataataacaatgaatttactcggatcatgttgaagcgtgtattcattaaaccaccattttcgccttcaaaattattagtcatccgtttttcttgattaaattcttggataaccgatactccttcaattgattcatttaagttagcgttaattcgactaagacgctcacgataattacgataaagacgtgagcttttttgcgaataaagccaaacaactaataataaaatcggaataaagagtaaaatcaaccacccagcaactatattagtagtaaacatcgctactaacgcagtaatcaccgaaaaagcaccaatcacaaaagttgatagcaccgtcaaaaaattactcaaagtcatcgtatcattagtaactctagaaacaattgagcccgcaggagtttgatcaaaatagcgcatccctagcttatgcagtttgcggtacaatgcccttctgacactctctagcgttttttctgatcctaaagcaaagaaatattggtaagtaaactgaattattgcctttaaaattgagcctaaagcataaagaaaacctgcaaacaaaatcacctgcactgttgtgctttgatgcaatagaaagtgatctaagaaatattgcaagccacgtggcaaaagaatattaattacactaacaataaatgcaccaactaaagcaacaatcatttcaaatttaaattgcttaacaaagcccattaaacgcttaaaaatatcaacttgctctttaaatggtatcgccttagaccaaacagattcatgctgttcttcgttattattcatctgtatcttcacctactttcgcttgtaattcctgtctacgccacatttccgcataccatccatctgcagctaatagttgttgatgattaccacgttcaacgatttgaccatcctttagaaccaaaatcaaatcagcatccatcacggaagtcaaacggtgagccgcgatcattgtagttttatcagctctctcttttcttaatgatgacaaaatctcagtttcggtctttgcgtcaactgctgacaatgcatcatctaaaatcaaaatctgactatcttttagcaatgcccgagcaattgacattctctgtctttgaccaccagaaagagataagccattttcgccaactaaagtttcatagcctttaggcatttgcaaaacatcatcatgcaaatcactcttcttggctgcagctgcaatatcatccttatctacattttcagaagagaaagcaatatttttgccgatactagttgaaaacaagaaattattttgaggaacgtaggagatctgactgagtaatacctttagttgaatatttctaatatcttttccattcagagtaatttgaccatcatactgatcaaattctcgcaaaagcagttgaataattgtggttttacccgcaccaactcgaccaactaaccctaaagtttgcccaggttttaaagtgaaattgacttgctttaaaactggaatatctggctcatctggatatgcaaatgatttaatgtcatattttaattcaccttgcaaatcttgagaagtaatatttggatctgcatgtgcatcagtaatcaaaggcctttcatcaagtaacttttctacacggtcataacttgcactaccacgctctagaatattaaacaaataaccaatagcaaacattggccaaaccatgttagaaatatacgcgataaaagaaaccaactggccaattgataaaatcttgttagttactaatagtcccccataaataatcgtgatcacatacgtagtaccgataattattgttcccagtggatcaaataaggaatcccagacaaaaacttttttattaatattgatcgtttcatcgaccatcttgtcaaaagcagcagtatcttctttcccttgaccaaaagttttgagcaccttaatcccagatacagattcctgagttttattattcagcttagagaatgcagcctgtgacttatcaaaagcatcatgtaagtgatcacctaatttccaagctcccaatgccaaaaacggtaatggtaataaagctacaatagttaaacgccaatcaacaaaaatgatcatggcaatcattgttgaaagtcccataactaaagaatcaaccaatgttaaaacgccatcaccagcaacgttctgaatggcagaaacgtcattagtagcatgagccattaaatctccggttcgatgacgctgataaaaagtccgatccatcaccataaaatgatcaaataactttgaacgcatttggcgctctaattctgctgcgccgccccaaatttgtttacgccaaaaatagcgcaaaatataaagtgtgaatgcagcggccacgacagcaatgatcaacattccatattgtccccaagagatgtgaccttgatccaattgatcggccattaagcctaatacacggggcggtaccaagttagctaaagaagttaacgccaaaaaggtaatgcctatgatataacgttttttctcagccttaaaaaaccaccctaacttactaaatattcccatatttcacctcattcttaaaagtgcacaaaaaagacgaaggaaatccttcgccttttctaacaaaactaattaaattaattacttttgttggtgcttcatcatgttcattacttgatgtaccttcttatttgaaggcttttgacccatttgggacatcatagcaacgatcatatcttcactaataggaggattttccttaaagtacttcttcatgtaagctcttgcaccgtaaaaacctgctacagcgccaatcaagagcgcaatgataattaaaaaaattgctaaacctaaattcatattaaatcctccatctaactaacatttatatcttatcatagttctctaactttttgaaagaactaattaatcttttctaagtccttttcttctttgtgctcgcttggcacgttctgaggtaacttccttgccattcttgtctaagatgaccatgttttcaacatcttgcttaaaggcagctctaaagttagctaaaaatttcttatgtagttcttttctttcagcttcttcctctggagttaagccttccttttctttcttatggtaaagttcgttgattcgatcagttacctttttttcttcttctttgctcattgcatctttattatccataataattccacctcacattaacactcattagtctaccctattttatgtcataaaaaaagtataacttcttaagaacgcctgtttgataatattgacattatctggtagaattaggttataatattaagtaccataaatacaaacggagaattaaaaatgccaagaaaaacaagcgataaaaagcaactagaaattttgcaatatatttacgatacagttgagaaacggagcattccacctacagttagagaaatctgttctgcagttggtctttcttctacttccactgtccatggtcatttagctcgccttgaaagaaagggctggctagtaaaagacgctacaaaacctcgtgctttggaaattacccgtgaaggtaaaaaagagttaggtatcaagccaaaggaaattccagttatcggtgtggttactgcaggacaaccaattctggcagttgaagatattgatgactactttccactcccaccagacttaaaaagtgatgctggtgaactctttatgctcaaagtccacggtgaaagtatgattaacgctggcattttaaacggtgatagcgtaatcgtacgcaaacaatcatctgccaacaatggtgaaatcgtggtggcaatgactgaagaaaatgaagctacagttaagcgtttctacaaagaaaaggatcactaccgattacagccagaaaatgatacaatggctccaatcattttacctaaagttacaattttgggtaaggtagttagcttgtatcgtaataacattgactaatttcaattttgacctagataatttatctaggtctttctttatgccaaaatttcagttattttttcttcaaataatggtaaccatttctttagataacccgcacgagttggatgaatttcatcagccatatacaaagcgtcttgatgctgaaaatcaggatgatcgtataaatctagaatctcaacgtgacacttttgagccagttcgtgtactcgttcaaccatctgtttgtataacggattagcaaaataaggattagtataaattaaaattggacatttccaccttgcttgagccgttgaaatcatatattccaaagctcccgtaatggttttggtgtcaaagttttgattagtaattttgcctagttttttattttgatttgcatcattagttgaaagttgtaagacaaaaacatcaggttgtgattcggtcagctcttctctaaaacgagcaacataagaatcgtttggcttataagtatcttcatcaactaaggtcgtaccattttctgcatctttaattgcagcaacgccatcacgcttccaaagataatcaacaaagctttcacccaaagcgccaaaaccaaaagtaacagaagaacccaaaaataaaattttcttacctatcaaaggactcgcaacggtttgtacactatttagactatacttacgactatttcctgctaaataagcaatatcagtgtaataacgttgatgtaaagcatgctcatctagatccatgcgtaattcatttaaagcgatatccgataaatcattattttgtctaattggaatcaaaaaagtttcattactcattttcagatttttccttttctacatacggcttgattttatcccaatctttaataatatcatctgttagcttgcgattataaaaaacagcggcaggatgatattctgggaaaatagtgtatctttcttttgaccaaatatagccgtctttagtttcatttaaacgtaaaattggtgtatttttaattacttgaccatgttcagctgaaatcttatgaccagaccccaaaagacgttctaatcccgtattacccaaggcaacaattagttttggttgagcatagtcaatttcaaaatctaagaaatgcgcatgagctagaatctcttttttggttggcttacgattgggatatttgattacttctttattttcacgcttgctaaaaacctttttgattgcaaaaggtcgacttctcacagcagatgtaatatatacctgatcacgtgtcagaccaatctgcttcaatgatttatccaattccttacccgcatccccgctaaagggaatattattaacaatttcatttcgaccaggagcttcaccgacaatcattaataaaggatgttggggacccgagccagaattaattccttctagctgcatgcctttagatcgttctttcacttcgtcaatcagttttttcggataatccatttttccatcttcttttaaatttttgttttactcgactttactggggacatttacaaatgtggataactattatttctaacgctaattccacatttaatattattttttacaaaaatagcttcacaataacaaatgcctttatatcaagattagtaatagatatctgccagctttgtgatttttgtcttagtttcacaaccgtttcacggttgaatttcttcacaatcttttttcatcattactactatacagccattttatcattgtgatctttttaaaataaaaggctatcaccttctattaagataatagtcctttatgatatcagtttaaaagtattacacacagactaattatgcaacagtgtctgcaatattaaattagttgaaccgtgacgataatctaatggtgatgcgccatagtctttttcattacccaaataaagatagtttttggtacctttaacatgtaaataaagttgaggtgatttttcaccttctattttggttctatcaaccgttagtttagcgccagcacgataaagcacctttttattttgcttaaatttggcagtatacgcatatgcatcatttattaaagaaacactcacaggtcctttatcccacaacgtcttaccatctactaaagcaacgtctgccgcattgatatattgtgttttactaatctgaaaataagtatgatcaccttgttgaattgcaggtaaagtcatcttagttttattttgataataataaaattgagtattagcagccgctttcttaggtttaccataatagtttaaaaccgtgccttgctttagatttttattcttgaattgcttgcctgttgcatcataaataggtgcattattatttaaaaacacggttcccttgccattcaaagtagttacttggctggcatcaatataaccgcccttaccaatattaaataattgcttaggcgaattatagtatggtacctcaatttttggtttttgtttattagtaaaataattcttgccaccattatagctaactaattttttaccatttttatcataaatataatttttcttgtgccgaaaatgtaacttgaccgtatttgtgttaccaagccaggttaacacatcgctttctttaacatagcctcctttaccaatcgaatagtaaagcttaccaccaataattcgactagttggcacaggaatcccagctgcaaagcgctgctgaataatataagtcttgccactatattttaaatgagtaccagctttgatattttgatgatatttcgaattataattacctgcacgatcataaattattggtgctttatttacctggattgtattcttagctgcttgggctttcttcgtcgttgcttgtaccgtagtcgtgatattgggaaaagataatataggtgctactgtcaatacggttgctgccacaagtgcaaatttgcaattgaacttcatttatttcacctcattcattccataactccatcatagcattttatatacaacttttgggtagaaaaaaagccagttccactggaactgaccttttttatgattgacgttatgattaacgacgtgcttcagcaattcttgctgacttgccgtgacgttcacgtaagtagtaaagcttagcacgacgtacacgaccatgacgcttaacttcaaccttagcaacacgtgggtcgttaactgggaaggttctttcaacaccaacacctgaagcaatcttacgaactgtgtaagtagcaccgatgccagtacccttcttcttgattacaacgccttcgaacaactgaatacgttcgtgagtaccttcaacaacacgtacatgaacagtaacagtgtcacctgcacggaatgcaggaatatcgtcacgaagttgttctttagttaattcttgaattaatggatccataatatacttttctccttcttcggcattcatcaacgtaccaacgccagcggaacacccctaaacttattcattgtggtcacgccacgatgaatagtatatcaagtagagcttgcttaatcaagctctgctttaatatctgccaacattttcttttcttcagttgttaaaactcgttctttgagcaaatcaggtcgatgcaaatatgttgttctaagagcctctttatgccgccattgtgcaattttttgatgattgccactagtcaatatctctggcaccttttgcccttcaaaatctgctggacgcgtatattgcggatattctaacaacccatgtgaaaagctttcttcaactggactagctgcattgcccaaaataccaggtaaaagtcttactgtagcatcaatcatactcattgttggcaattcaccaccagttaaaacataatcaccgattgaaacagtttcgtcagccaagtcataaacccgctgatcaaagccctcgtaatgtccgcaaataaaggttaattcatcttctttggcccagctttgcgctattttttcattaaaagttttaccttgtggtgcagtaataattaccttacctgtggatggtaacgagtcaagtgcttttttaatcggcataatttgcaaaaccatcccagcgccaccaccatagggcgtatcatcaacatgatgatgtacatcggtagtgaaattacgaaaattaactaaattaagctcccattttttatcttcaagcccacgtcccaacattgaaacttgcaaaggagcaaacatatcaggaaaaagtgtcaatacattaatcttcatcgcgtaagccctccaataactcaacatagacttttttattagctacatctacttttttaaccaccgatgcaatattaggaatccaatactctttaccattatcttcatggactagccaaatatcattagcaccaggcgattcaatatcagtgattttacccaagcgcttaccggattcttcatcaatgacatcacagtcaaagatgtccttataataataaacgccttcaggtagttcaccgcggtcggcttcactaacaactagtatttttccttttaatttttcagcttgatcaatatcagtaatctctgcaaattgaactaaccaaaattgcttaaaaggtctactcttggccacagttaaaacttgagaagtttcacctttgattgccaaatgcatccctatagcaaaacgatcttcagggaaatcagtaattatactaactttaacttcaccattcaaaccgtgcgtagttaaaatccgagcaacatcgtaatattccattttttctcctttaggtataaaaaaagcttgaagcacacggcatcaagctcttaattaatagcaaaattacttattgtattttgcatcgtgcaacttagccatcaagccagcacctgaaagaagtgatctaacagtgtctgaaggttgtgcacctttttgtaaccattcaaagatcttgtcttcgtcaagcttcaattcctttggttgtgaaactgggttgtagtaaccaacttgttcgatgaagcgaccatcacgtggcatacgtgagtctgcaacaacgattctgtaaaatggctttctcttggcaccagcacggtgcatacgaattttaactgacataaattaatttcctcctaaaacttaacgattaataatataccaccaaacttaacaggtgtaaagtatttttccttaacagtttattttttaagaatggaatctttttaccttgcgtaaacgcttcttcttatttttcttgaaattcttgttcattcggcgcattgccatcttagccattggcgaatccattccaggcaaattgctcaagcccttcatatttcctttagacattttactcatcatgtcgcgcatttgcttaaactgcttaatcatcctattgacttcaactacaggacgacctgaaccagcagctattcttcggcgacggcttggattaagcatatcaggattttctcgttcctcaggagtcattgaataaacaattgcttcagtatgatcaatttgcttttgatcaacatttagattctttaattgcggattattagatagtcccggaatcatcttcatgatttggtcaagaggccccattttttgaacttgttgcaattgatcaacaaaatcattgaagtcaaaagtattttcccgcatcttttcagcgactttttcagcttccttagcatcataatcttgttgggctttttcaattaaggaaagcatgtcacccatacctaaaattctggatgccattctatctggatggaaaacatctaaatcgcttaatttttcaccttgaccagtaaataagatcggcttaccagttaccgcacgaattgaaagagctgcaccaccacgagtatcaccatctaacttagtcaaaatcacgcccgtaacatcaaggcgttcgtcaaagcctttggctacatctgttgccgcctgaccagtcatggcatcaacgactaaaagaatgttatcaggatgggttactttctttacccgctctaattcttccattaaaggttcatcgatttctaaacgaccagctgtatcgatcaaaacatagtcattcttgttcttttcagcctctgcaagtccatcttgaacaattttagctacgtctttttctccgtcttcactatatactggaacttttaactgatcaccaatttgtttcaattgatcaacagcagccggacgataaatatcgccagctatcaacagcggacgggccttttcggtcttttgcaaatgataggctaatttacccacagtcgtagtcttaccagttccctgcaaaccaaccatcataatgatagttggaatatgcttagacttgtttaaaggaactgcttcttcacccatcatcttcgttaactgttcattaacgatcttaattacttgttgacctgggtttaaactttcctgaacttccttgccaagggcttctttcttaatggttttaataaagtccttaacgaccttaaagttaacgtcggcttctaacaaagcaagtcgaatttcacgactagccttattaatatcttcttctgagaccttacctttgccagttaaattttttaatgctttttgaattctttcacttaaattttcaaaagccatgggctattctcccctcaattgatttaataaattggttatttcttttttagcagcttcactatcaccattatctaaagataaaagcgtatctgccaagacatcttcaacctgattgttgtcgcgcttcatatgcaatttctcttcatagttctgaagaattttacttgagcgcttgagattatcatagacagcctgacgagatacttgatgattagcagctatttcgcctagagacaaatcattgtagtaatagtcttcaaaataagattgttgcccctgggttaataaagagccatagtaggcatataaatcgcctagctcctcgtttttagttagttcatccattgattttcaccagtctttagtataacaaaggtcataagctagtgctagattaacctatcttagataacaatttctaaaaaaagtggaatttcaaatatgtaatagttgattttttaacgtacttttaattataattagatgaatatattttaacataaggaggaagttgcgttgtgaatctttggcagagaatgaacagtaaagaagatccacgcgtctatgaaaataaagatggacacctggtgcgctcattaaaagtaaaggacttcttagctctaggtgttggaacaatcgtctccgcttcaattttcactctacctggtgaagttgcagctaagcataccggccctgcagtagcgatttcctttattttagcagcaatcgctgctggtttagtggcttttgcctatgcagaaatggctgctgcaatgccatttgcaggatcagcttattcatggatcaacgtagttttaggagaattctggggttgggtagcaggatgggcccttctagcagaatatttcattgctttggctttcgtcggttcggggctttctgctaactttagagctctaatcgcaccattaggttggaaactacccgcgtcattatctaacgcctttggcaataacggtggtattattgatatcatttctttagtttcaatcttgttagttgccttattaattggtcatggtgtttcaagggcagctcgcgttgaaaatgccttagttgtattaaaggtgttagccattctactctttattgccgttggcgtttttgcaattaaaaaagttaacttcaccccatttataccgaaatacaagatgactgctaacggtccattcggtggctggcaaggaatctatgctggtgtttcaatgattttcttatcttacattggctttgattcaatcgccgctaactcagctgaggcaattaatccacaaaaaactatgcctcgcagcattttaggctcacttgctattgctgttactttatttgtcggagttagtttagttttaattggaattatgccttatcagaagtatgctaattccgctgaaccagtgggtttagccttacggtttgctggtcatccaattgttgccatcattgtccaaaccattgctgttttagggatgttcactgctttgattgggatgagtatggccggttcaagattgatctattcatttggccgtgacgagatgcttcctaaatggctgggcaagttgaatgcagatcgtcgacctaataatgctttatggacattaacaatcgtagcaattttacttggagcatttttccccttctccatgttgtcacaattggtttcagctggtactttaattgcttttatgtttgtttctttaggtatttataagttgcgtccacgtgaaggaaaagacattgatgatccttcattcaagatgccattttatccagttttacctgctttaggtttcatggctgctttaattgtcttcttagggcttgactaccaagctaaattttatgctggtatttggtttattttaggcttaatcatttactttagctatggtgttcgtcattcaattttaaataagcaaaataaataaaattaatctaaatacagttaaaaagatctgcattttgcagatcttttttcgtaccattattttttcaatacaattccttcatagagttttactgtaattaagtaataaagcaaatacaatactaaaaagatcgtaaatggaatccaaattttatcgtatggattagctaaaatccctttgaaaaattgtagtccaaataatacatcaatcacacccaagacagccggtaaagcgaacaaggtaccaatctccgctttaatcgagctctttaataacttacgtcttgatccgaccttccacaacatttcatatcgaggacgatcactgtttgctcctgatagcactttaaacattaaggttgaagctaacatagctaagaaagctaagcctaagaagaagcccataaattcaaaacctgacgcaacgcttgctactaagcgatattgagcagatttagaattattcagagaaacataaactccttgtgcatccttagtaactgtctggtcaagtgacatcttttgcaatttttcaatattattaaaattacttctaaagttattgattaatagcaaggttacttgtttgttttttccaggaatcttcacatattcagctggagttacaactttaacctcataatcagaataaggtgttaaactagcaagttggaaattcatctcttgttttttattctttacacctgcaactgtaatcgtctttgtcttccaattcatttggtcgccgttctttcgaccagattggaatttgatttttttcttagcaatttcttggtcagtaacatatagaacaggaaacttctttttcccattgaccttataattcaaagtcgtttgttttctaacggcaacttttttaagttgttgattaactttagcatcccttttatacaacacagcatcataatatgttgcctgaagagcagtctctgtcatattattaaagtttaatccaacagtgatcgcacctaatgctagagcaaaaagcaaggaaataacagttaaaactctattgtaatcacctaacctaaattttagctgacctaaggtaaaagaatgcagtttactgtatttaaactttttatttttccgtaaagcattgataactgtagtaaatacagaatcaaatacaaaatatgaaccagccaaaatagtgacaaaaccaatttcaaccgatttaatttgcaactgatggtaatcccacattgcccagtagccaatggctagaagggcaaggcctagaattacttcagttgctttccagattcggttattacgtaacttaactggtttttgatcctcatgcaaaagcttgattacactagtacttaccaatttgtgccgattccaaattgcagccaagaaaaataaaactacaaagaaaacaactgtccataaaatagccggtaaataaaagcctaagaatttatgcagctgcaaacccagttgagagattaataactgagaaacaacttgagtcaagccgataccaattaaaattcctaatgcagtagcgagtaaaccaataacaaccgtctctgtaaaaattaaacggccaattttactatttctcgctcctaggatcatataagtaccataatcttttttacgcatactaagcaaaaaactatttgcgtaaacaatatagactagggtaataatagctaatagcgctatcccaaaaataaagaccatctgggtaattgaaaaggcaatggccattgaacccttaagaaaagctggattaattgcaatggtcataaacatataaaagattgcagcagctagagttagccccgaaaacaaaacagcataatctttaaagcgactttttagccctgttagtgataatttccaaagcacgtctatacctccctctaacgtctacctaattcagcaataatatcttgataaaattcttctctggtcttattttcttttttaatttctttgccgatttttccatctttgatgaacaaaattctttgagcgtaagaagctgaataaggatcatgcgttaccatcagaatcgaaacttgatcattcttattcaagtctgccattgttttcaataattccgtagctgattgtgaatctaaagctcctgtaggttcatcaccatataaaattgccggattatggaccaatgctcgagctgaagcaacacgctgtttttgaccaccagaaatttcagctgggtatttgtccaagatagattctattcccaatcttttggcaatcgccattgcttttccgtcaatatcctttgccttcactccttgaagcgataatggcaaggctatattctcgcgattagtcaaattatctagcaagttgaaatcttgaaaaataaagccaatttcttttccgcgaaaatctgccatttgattgttcttaagtgcagtaatgtcttgcttattgactaaaacatgtccactagttggcttatctaacgtcgacaagatattcaataaagttgtctttcctgaaccagaagcacccataatgccaacgaattcaccttgttcaatggcaaagctaattccttttaaagcttggtattgcttctcaccttttttaccataagtcttagttacttgatccactcttaaaatttctgacatttttatcctttcactaataatattactgttctatttacttaatacagtaatattatattaaagatttgtcaataatttttgcataaaaaaactccaaaagtaattaacttctggagttctactattttacattacttattgtcttcactcgacttaagcatctttttcagtacattaaccaagccaagagtttcatctttactgagcatccctgtaatagtttggtcagtttctgcacggtgcttttcaaatttcttgcacaaatctttggcagccaatttttttgtcaaagatttgaccttgtcattagttacatgcaattctttagccaacttttcaaaagttttgccatgctgatgatgatttaattcaataagcatttccaattcattagcattaataccaaattttttaaatcgttattcatttgtttttcaacttcattgttaatcttagtaaaaaatgagccaatagtaccttctgccattgtctatattcctttcatttcacatattataaaaaacagccctttttcgagctgttttgaatttattaaagattttcatccatattgaaagtaagtttggacatgttgatcgattcaatcatcatttgaccccaaagcttttcagtttccttacgagtatgggcaacagtcttttgattttccttagtcaaatattcagttaattcatcacctgatttaccttctgcaccagcaataatttcttcaactcgacctctgaagtagcggttaagttcagttaaataagtagtatcaagctgaacaaattgtgggtaatgactttcaacgatagctgcaaatgacttgtaataccaccatgcatcattcatattgtaatccattgaggtattgttatatgaaggatcagtatcattcatattagcaaagaatggtacaaatggagtgaaagttggaccaccgatacataaccacataatagccgcacgatctgctggaacatcacttctaatttgcaaaatatgagcattttgcgtacggttcaaaccgattggacggtagcgatgtttttcttcatccgtacccttaccaaatggatcatacggggtatcttggtagtgtgaacctaaagcaaattgaatatcttccttagtgatcttcttagctgccttacgaataaatggaatatcgccatcttgtgggttttgttcaatttcgggattgaacaatttttgaatataccattgacggttggtgttgtagtgacgatcttgttcagtataggtaccaaaaatatgacggaagttccagccttcatgatctgggttcaaatggtgttcttcaacaaattcttgaatacctttactccacatgaagtaatcaggattatcaaagtcaacttgttcaatcgcaactcgattaccagttgcagcgtaacaatcatctggaatgcgctcggctacccagtggtgacctgtaacaatttccatgtaccaaatttcatctttatcactgaataaaactgagttaccagctggtgaaccgtacttagcaattaacttacctaaatattgtacaccatcacgagctgaatgaatgtatggcaaaacagaagtctgcatgcagtcttcatctaatccatctttaacaagtggatcaaatgctaaagttctctcattaccataagttgattcagtacatgacattgcaacgttttcttggttaattccactttcatcgtagtagccacgatgcttgtagtcaacattaggaacagctggtacacgttgcgcatcttctggcaagtccatttcaaacttgtttaaccatgacttaatatgtttcttttcaccatgacgggctggctcaataatgaacttttgtggggtaattggacgaaaagtgtcatcattacgagcaatcatagtggtgccatcaatcgaggcatttttaccaactaagatagtagtacaagcactatattctttcataaaattctccttataaaacaatatttacatctctaactttatcactagaccaagccgtggaaaagaccgatcgcataatttgcagcatcaaaatcagctaagtcttcagctctttcgcctaagccaaccaatttaaccggcaaattcatttcgttacggatagctagaactacaccacccttagatgagccgtccaacttagttaaaacaagcccagttaattcggtggtcttgtcaaagtctttggcttgcaaaagcgcattttgcccggttgaaccatctaacacaagcaaggtttctgttggctgatctggtaaaagcttcttgattgttctttgaattttttccaattcagccattaaattcttcttattttgtaagcgtcccgcagtatcgactaaaagatagtcagctttttccctgattgcccgttcagttgcatcataaacaacagaagcaggatcagccttttctttaccagtaactacgggtacgtcaacacgttttccccattcaactagctgttcaacggcacccgctctaaaggtatcggccgcagctaaaattactgactttccttcatccttaaaacgtttggctaacttaccgattgtagtagttttacctgcaccattaacaccaacaagtaggtaaacgttaggtttagcttcagcattatacgtcaattgctcatcttcgctattgccacctttatcgtaaaggtcaaccaacttttcaacgattactcgcttcaagtcatcacgtgacttagcattttgcaatttagcctcttcacgcaattcattagttaattgttcagcagtttcatagccaacgtcagattcaattaataagtcttctagatcatcgaagaaatcttcatcaactgttctaaacttggcaaaaaaggcgttaagtcttgcaccaaatcccttgttagtcttttctagccccttttcataaagctgttcttgtgattctgttggctcctcatcagaaacttcagtttcttcaacttgttcttctgtttcagtctcagtagtctcttctactttaacttcttcaggctgttgtttagaatctaaatctactgctttttcttcatcaccagattcagcttctacctcagagtcttcttgtgcttctactgtttgttcttcttcatcagtagtttcagttttcgatttagcttcatcaactactttttcagattcttgatcattatcttctgattcagtcttagcttcattttcttgctcagtctgtttttcttcttttttgttttcatcctcttcgtcttttttaccaaagagtgatttttttattcgatcaaataaacccaactatttcacctcatttttattcttcatttcttttaatgaaaccgacaatacttgcgaaacgccagattcttgcataaccacaccatatagttggtcagcctgccgcatcgtccctcgtctatgcgtgatcacgatgaattgggttttcatatcgtatttaagcaaaaattgcgcaaaacgagtaacgtttgcatcatccagggcagcttctacttcatcaagtacacaaaatggtaccggattaacctgcaacatggcaaacaacaaagtaattgcggttaacgcgcgttcaccaccagaaagcagacttaaacgttgctgctttttgccaggcggctgtgcgataatctcaattccagtttctagcaaattattaggctcagtgagttccaatctagctttaccgccaccaaagacaactggaaaaatactcttaaagctagatgctacttgattaaaggtactcttgaagcgcgtcttaacttcttcatctaactcgttcattgacttttcaaggtcatcacgagcttttaacaggtcattttgctgaccattcaaaaagtcatagcgctttttcacatcttcatattcttgaatagaatcaagatttacttggccaatatcttcaattgacatgtgatgcaacttcacgcttttagccagttcattgcgcttttcttcagtattttcgccttctgcttgctctaaagcagcttcaaacgttaaggcatactcttcactcaaagttgacaagcgctgatcaattgcggaattaaacttcgcaatctttactgagtaatcttcttgttcaattgctgcatctttgcgtaaatcataattacgactggcaacttggtcaagttgattaatctgcgcatcaacttgtcctaattgcgcactaagttcattcagcttcttttgcagagtttcattcttttgcttaatttcagctttttgtgtttgtaaatcagaattctttttaactgataattcaccattttgacttaattcagttaatttctgctctaagctatcagtttgcttctgattattagtgatctgaatatttttttctttttcctgactagctaagttttccaacttattagtataaactgcaatttgaggatcaagctttgataattcctcttgtacacgttgacttaagctattgaagttcttaatcttttcttgcaagtcattcattttgcccttttgtacttcattttgcttagccaattgttcctgctgatcattagcctgagtgatttctttctttaaagcagcaatccgatcttgttgttcttttactcgagatttatataaactattagcatcagttagccgctttacttccttttcttgattttggaaagaaatagcagcttcattaatcgcttgattagtctcctgcaaagtatcacgcagttgttgcaatttagccgcaactttttcaccttgagtaactagctcatctaaccgttcttgatcttcagccaaattttgtcgtaaagtctgtaattgcttctctaactgattaatttcagttgccgtctgcagtggtgaattattacgttggtttctttgaccaccagtcatcgaaccacctggggaaatcacatcgccatctaaggtaacaatccgatagcggttaactcgacgtgaaattgacattgcactatcaatcgtatcaacgataatcacactacccagcaaataattaatcgcagcagtaatatcttgatcggctttactttcaactaaatcacttgctacgcccttaaagccactaaaagattgcaaagtagtgatagttgactgtggaatagtatattgacgcaagccatctaatggtaaaaaagtagctcgtccactacgactacgctttaattgattaattgcatccctagcactaactctgctttcagtaatcaaatcctgtacgccaccgccaagagctgtcgtcattgcagcttctagctcaactggaaatgtaatcaattcacccacagccccgatcacaccagggaaatcagatagatgattcaaaacattacgtacaccgtagtaataaccctcatgccgcttttgaatatttactaaagcttcatgtcgcgcttcaactttctctaatttactgcgctctgcgttaacggcttgccgaatctgattaatctgtttagttaaatcattattttgatcattaacttgcgcaaatttttctttttccttttgccgcttaactgtcagctgcttgccttcagttctcagcttttccagttcagtccgagcatcggttagctgcttgcttacatcactattttgataagtagtgtctgcctgactacgttttaattcagtattcagattaacaatctgattattagttgtagcctgatcttgtaaaagttgaatatagtcgttacgacaatcttctagtcgcttactcaattcttctggatcatcgtgcaatttaccagtcaattgatcatgctgctcttgtaaagcatcttgctcctgcttaagttgctttttattccgctgcagttcagacaattcatcctttagcttaaccaagctatttttcaattcttcaacttgacgttgagtttctaccctagttgaattattaaactgttgtgattgctgtgcgacctgcaagttagtattgatctgtgataattggtcacttagctttaataattcactctgcgtttgctctcgctcattttgaattttttgatattctgcccgtttttcagaaacagcactttgcgaaccttttacttcattatccagttttgttaacaggatttggttcctatctgctgctttttggacttcttctttttgccggtttaaatcctcaatttcaaaagctaatagactttttaatttctgatctagtcccttcttttgaaattgatattctttagccagcgaactttgctcatgcagcggctccaatcgaccttcaagttctttaaccaagtcattgattctaattaaattatccttggttttctccatttgcgccttggcagcttctttttgttgtttaaaatgcaaaacaccagcagcttcttcaaagattactcttctttgttcaggacgagaatttaagatctgatcaactcgaccctgagaaataattgctaggctattaggtgaaattccagaatcaagaaagagtgtccgcacatctcgcatccgcacttgctgattattaattaaaaattcactgtcacctgatcgcagaaatcttctagtaattgagacctgatctgaatcaaaagccaactcacgctctttattatcaaaaactaaagtaacttccgccttattgagcggcttgcgaaattgactaccggcaaagatgacatccttcatattcgttccacgtagtgacttagcactggattcacccattacccaacgtacggcttcagtaatgttacttttccccgaaccattaggaccaacgattccagtaattccatcatcaaaatgaatagttgtcttatcagcgaatgatttaaaaccatcgagcactaattctgttaatggcactttttcatccccttatttttctaatttttgtaaagcgaccttagcagcttgttgttcagctgctttcttattgtgaccctcaccttttgattcaacttttccgttaatttttagttcaacaacaaagtgtgaaggtaattgagattcactaataacggtgtattcgatattcacaggaccatcttgctgcaatacttcctgcaagtctgtcttatagtcgcgtgaatcatcgaattcacccttatcaatcaatggataaactgttaaatgcaaaaaatgttcaactgctggcatcccttgatcaaggaaaagtgccccattgaaagcttcaaacacgtcttccagtaaagttttgcggtgtcgtgctccagctttttcttcaccattgcccaagtgaatctcatcttgaaaaccacattcaatggcgaattctgaaaatccttcagttcggacaatattagatctcaaacgagttaattcaccttcattcaacttaggataatgaagataaacataattcgaaacggctaattctagcacagcatcaccaagaaattcgagtttttcataatcgcgaattccatcattgggatgttcatttgaatatgaagaatgcgtaaatgcttcttctaatagcttttcattgttaaattcgatattataatcgtcttttaatttttttaaaaactttgtacttaccataaaaatgcccctttttatacctataaattataccagttttcgggtcacagaaaaaagactgcttctaaaatttagaaacagtcttttgtaattttaaataattgctttacttagcgtaagcaacattgtaccagttagggaaaccattacccattgaatccgatggcttaagtgagtaaccagtaagcttcttgttaacggcagtaattgagtaactattagctataggaattacgtaagcttcatcaaacatgtacttttgccattcttggaatttttcaactctgtacttgtggttgaaggccttctgtgaatccatttcgtcaagtaacttggtgttttcaggagttacgaaacgtgagtagttcattggagccttttcgctatacaagtcattaggtgatggttcacttgataatgaccatgcaccaataaacatatctactgatggatcatcgttttgaaccttgtcgtagaatgaattgaattcgattaaacgaccactagttaacttaacgttcaagcccatcttcttccattgttggatgtagttttgaacgattggttctgctgttgaactaccagtcatagcagctaaacgaatagttaaaggcttgccattaggttgtacacggtaagtacccttcttcttgtagccagccttgtccaagatttcgttacccttcttgatattgtaagtgtaacccttgatgttcttgtcgaagtaatcaccgaattgcttaggaattaaagttggaattctgaatgataaaccgaatgagtagcgcttgtaaacttggttaacattcataccataaccaatagcttgacgtaaggccttgttattcatcttagaattcttgtccattacgttttcgcccttcttggcatcccacttaccaaccttaaagcctaagtatgagtattgtagtggaattttagcgataaagttaacgcccttagtatccttgatgttcttccattgtgagttgattacttgagtaacgtcaaattttctggacttaatactttgagcaactgagttagggttaattactgtagcagtaatctttgaaagctttggcttacccttgtagtagtattcgttaggaacccaagttactgattgaccacgaacaaccttttgcaacttgtaagcaccaaagaacaatggcttcttacggatcttatcacttgacattaagtccttgaatttaacatctttcaagtagtggtaaggagcagcagcttcccaaatgtaaccattacctgaagtgttcataccaggtttcatcgtcttaaagtgaagaactgctttacggccgttttcaccatctggcatttcaaagcctgagatagtctttgacttaccttcatggtattcttgtaagccttccaaatcagctaaacttgaagtgtaacgttgtgacttagtgtctttgttagcaataatttcataagcgtattcatagtccttggcagtaacttgcttaccatctgaccacttaacacccttcttaatttcaacagttacggtcttagctttttggtcaaccttaattgttgcagcacctttatcattgaaaacatagtgatcatcagtaccaaaaagtgattctgcaccatattgcataacttcagtatcagtagctgaagttgaaagttcgtcgttgaagataccagtaaatggggtatcagcttcaacagcaaccttaacagtaccgccattcttagtagccttagtaggaacagcttccttaaacttagaagcagtctttgattcatcagaatgagattctgacttaccacaggcagctaaggtaagagctacacctgataacagtgtaataccagcaaaaagttttgcctttttcattagtaaaattcctccattacttggagcaagttgatcctttaattttatcactattacaaaaacataacaatagcatgaaaaagacaggtatttggattaagatacctgtcttttctattagttagttattagaatttaatataaggaatttgtttatgtttagaattttggagtttagttttactaatgattaatgaattacttagcgtaaccaacattgtaccaaactgagttagcatctgaaggcttaagtgagtagccagtaagcttactattcacagcgtcaatttggtatgcattaactgttggcacaacatatgcttcatcaaacatatacttctgccattcgtggaatttttgtactctgtatttattattaaatgccttttgtgagtcaatgtccttaagaagctgagtattcttcttagttacgaaacgagtgtagttaaatggtgccttttcattgtaaagatcgttaggagaaggttcgctagatagtgaccaaccagccatgaatacatcaacgtctttagagtcatgttgaactttatcatagaatgaattgaattcaattagacgaccagttgttaacttaacattcaagccgatcttcttccattgttgaatgtagttctgagtaattggttcagcagtagaactaccagacatagctgcaaggtgaatggtcaaaggcttaccatttggttgaacacgatacttacctttcttcttgtagccagcgtcatcaagtaacttattagcctttttaaggttataattgtatcccttaatatttttgtcaaagtaatttccaaattgttcaggaattaaagtaggtactctgaatgttaagccttgagtataacgcttttccacagcatcaatgttcattgcataggccattgcttgacgaagtgacttattgttcatctttgcctttgggttcatgacattcttaccattttcccacttaccaaccttgaagcccatgtagctgtattgaagtggtactttagcaacaaagttaacacctttagtgttcttaacctgttgccattgtgaattaacaactctagcaatatcaaatttgtgactcttaatagcttgagaagcagagttagggttaactacagataccgtaattttatctaattttggagtacctctccagtagtatttattaggaacccaagttactgattgaccacgaacaattttactaatcttgtatggcccaaagaacaaaggattcttacgaacagcatctgatgattcaagcttattaaatggaatactctttaattgatgatatggacttgcggtttcgaggaagtatccgttacctgattgaagcatcccaggtttcatttccttaaagtgaattacaactttacgtccatttgctccatctggcatatcaatacctgaaatagtcttagctttgccatcatgatattcagttacaccaacaatgttttgaagtgaagcagtataacgttgagactttgtgcccttgttagccataacttcatattcatactctacatcttttgcagtaacctgcttaccatcttaccacttaacaccttttttaacttcaatagtgatagtctgtaagtgtcaatgtttttgcggtagcctttaaaccattagtctaaccttaatttcttaaatatttatatgacttaaatttctgcttagcttgcttaaataactattgccagctacctgtgcggttaatgcgccatgctggatgcctaaatgaacttcatgacgcttctttaagctgtcacgggccgctgcttttaattcctgttcagtcaatacagttatttctgaatcttcaaactcgctgctaagccaaaattccagctctcgattcttgatgcagcttaagatcctaagcatgccttctgctccagattttgaccatttcttgccttgccccttaacacggtaggtatacttgcggtggttgctctcgcagcagccaatggctttagtcacagtcagttttcatttcttaaacggcttaatatcgtcccaatgacgatcaatataattccttaggcgccccagataatcatgattgagctcggtattcaattcatcaattagtcggctttctgcagtggttaggatagttttaactttgtcatagctgtatttgtattccaaagcagaaatcagcttgccttgcaggtcaggcgcaaaatatagcctttctttgattttcttatttaggtgaaagacatccaagaaatgctcatgacgcttgcatagccctacaatgtcatcgaagtctgttttggcatatccagcaccgccatcggcgttgctaagaattacagtatcagaaagatcataagtattggccaggtactccttggcttcgttcagcgcatcaagtcggcttaaagaaacaaattccttggcattgattcgctttctgcgtttcttgcttatattgacaatgccttcacagacctgatagcgatgaaattccaaccggcttttagtgcctttgatcaccacgccatcgccttcaagatacaaaactgggacctttttcttagtgcctgcggcatcatatcttgaatctgcttcttggcccgctttaatatttttcccggccatttttaccaaattgcccacctgcatatggctaatattaaagccagacaggcaattgactgctagagcagtattgcgataagtggcaacgctgcttacttctaagatgtttttgactgctaaaatactgtagcgcttgtatttgtaaaagcccattaattcatccaagggataccttgcttgtttgcctgggcagacatatcttcttctgacatacctaacttcgccaaaagccatattgattgagcgctcattcttcttatcaatctgatagccctgtgctttaaccttggtaatcatttcatcatcaactttagctaaagccaaggccatgatttccttaatcaggtttaagaagaaacagattatttttctttcacgcttaatataattatcttcagactttataatatttgcgatttcagttacaattgaattcataaaagaccagcttctaatgtgttttttgttcttaacatcagactactggtctttttgtttgagctcaagtccaaattcaaaggacttgggcttttttaattatttattcaacttaccgtaaaaaattatacacttagtgatagtcttagctttacggtccaacttaaaagttgcaggtcccttgctattaatcttgtaactgtcatcagtatcaaataatgattcattaccaaactgtgctacatctgtgtcaatagcagaagttgataattcattgttaaaaatacctgtaaaaggtgtatcagtttcttcagcatatgataaagtgccgccctttttgactgccttaactggagtagtttccttaaacttcttggcatcctttgcgccagcattgttactgctactcttaccacaagcaactaaagctaacgctgccgcagaaacgactcctactgaacccaatacttttgataatttcatactttgtttcccccatctaggatacaattcattttcaatagttatttgaatcaggttgatgattaaataataccaccataaattaaaaattcaatagttttatgaaattatttttaatttttattttatttgctttcaataagattctagttataaatatgcaaaaacagctctaccaagcgatagagctgttttaatttaattattactttattagttttcacgttgtcttgcgtcaccagcacgttgtaaggcttgaccaacatagttaatacttaaggaaattaccaaaagcaagatagtagctggcaaccacaaccatggacggttaataacgttaactgggtcattagcaaaaccaatcaaagtaccaagtgatggcgtggtacttggtaaaccatagttcaagaatgaaagactagtttcaataccaatgttacctgcaatactcaatacaacgtcgataataatcattgaagtaatgtttggcaaaacttcacggaacataatttgtaaattagatgaacctgaagtcttagatgctaaaacatagtcacgaccacgctgtgataagacgaaggaacggaagtaacgtgccgtcgttgtccacccaaacatcgcaatcaagaataccaaagttacagcattgtagttagggataacagtagtcaaaacaataataattggcatttgtggcaaaatctgaatgaagtcaacaactctcatgataactgagtcgattgcaccaccaaagtagcctgataccaaaccaactactaaaccaactatttcagtaattacagttactgagataccgatcatgattgagttacgcccacccatgatgagcaacttcaagatatcacgaccaccatcatccgtacctagcaagtggcccgcttcaccccaaccatagtatgagtcagcaatattcatttctgttacttgggcacgattcaagaataatgaacctccaaaagtaaacagtaaaatgacaataatgataatcagagcagttaaagcagactttgaacgcacaatttcacgcattgccaccttgaatccagaaggtgggagagttgctttttgcttttcgtcttttttagtagctttctttgtagctttttctttcttatcagccattttttctctccttcctattgaattctaatacgtgggtcaatgatactcatgatgatatctgataataagttaccgattaaagttaagataccaaagataagaatcaaggcagtcaaggtagtgtagtcacgttgcccaattgagtcaaggaacaacttacccataccaggataactaaatacactttcaatgatcattgaaccactaagaagaccggtaatcgtgttacctaagaaggcagcgattggcaataatgagttacgcaaaatgtgcttatggaagacgacgctttctggaacacccttactacgagcagttcttacgtaatcttcaaccttgttatcaacaatcccagttcttaagtactgaacagtaccagtagtagtaatcaaggcatacagaattgctggcaaaatcatgtgatagattctactgccaagtacgccccagaaaccagaggcactagctgaaacagaaccagaaattgggaaccaacccaaggtgaaaccgaagagccacaaacctaagatgtagaatacgaatcctggggtagccaaggtgatgtagttaaaaattctaacactagtatcttgccattcgtcttggtgacgacctgaagtaataccaagagggatagcaatactataagtcaaaatagtagttaaaagtgataaccagaaggtgttgttagcacggtcagcaatcaatgaagttactggcacatgttgaatgtaacttgtaccaaggtcaccatggaacaagttgcccacccatctaaagtattgcacgtaccatggatcaaacagacctgcagcccgttttaaggcttcaatttgtttagggtcggtgttagggttaattgatccactgaatgggtcaccaggcatcattttagccaaaaggaagaccagcaaactcaagataatcaattgagggatcatgattaacaaacgccgtaaaatcgttttccacatgcttaatcactctccttttcttctaattcttcaagtttagcttcgtgggccatatcttttggcaaagctacccagtgcttaggtgctacttgttgtaatggatatacacgaccatccttgtcgtaccatttactttgattttcttcaaattctttttcaacttgttcgcgatgtttcttgtgttcttcacgatgttcaacatcaacttgaggaatagcggaaagcaaacgcttagtatagatgtgaattgggtgcttgtagatttcttcacggctacctaattcaaccaaacgaccacggtgcatgattgccaagttttctgacatgtgcttaacaacacccaagtcgtgtgaaatgaacaagtaagcaatgttgtattgttgttgaatgtgcttcatgaagttcaaaacctgtgcttgaactgacaagtccaaagcagacgttggttcatccgcaacaattaacttagggttagtagcaacggcacgagcaacaccgattctctgacgctgaccacctgagaattcatgtgggtacttgtagatcgcatcactaggcatccctacaatatccaacaattcttgaacacgatcacgttcttgatcagtagtcagattttcaaagtttctaattggctctgcaatgatatcttcaattctctttcttgggttcaaacttgacattgaatcctggaagatcatttgaacatctttattataatcaagcttcttacggttgcttgccttagttacgtccaaacccttatacatgatttgaccacttgtaactttttcaaccccaacaatcgccttaccggtagtagatttgccagaaccagattcaccgattaaaccgtaagtttcaccttcaccaattgaaaaattaatcccatcaacggcacgtacataatcagtaattctgttccaaaatccagagcgaattgggtaatagacctttaaatctttgatttgaataatttcttttgccataaactactccccacttgctgtcttttcatcctcaaagtggaatgacttccagcaagtacatcttacccagtgacctggcgcaacttcatgcaccttaggttcttcttcatgtgcgctagcaggaatccaaggaattcttgcagcaaatctatcaccagtacgtggcatattcttcaaagatggcacagtaccgtgaattacatgaagatcttcatccgtatcgtctgattgaggcattgagttaagtaatgatcgagtatatggatgaagtgggttttcaaaaattgtctttacatcagatttttcaacaatttgaccagcatacatgactgcaacttcatcagcagtttctgctacaacacctaagtcgtgagtgatcaaaataatccctgagtgagattgtttttgaatatcttcaagcaaatccaaaatttgagcttgaatagtaacatccaaagctgttgttggttcatcggcaataataacttcaggcttacatgcaatcgccatcgcaattacaacacgctgacgaagcccaccagacaactcatgtgggtacatttcgtacatttcttcaggctttggcattcctacttgattaaacaattcaatgacacgtgcgtgacgtgccttttcgtccatatcagtgtggtaataaagagtttcagcaacttgatcaccaacacgcatcaatgggttcaagctggctaatgggtcctggaagatcattccgatcttgtccccacgaatcttattgaaaagtgattcattcaagccaactaggtttaattcattgtaaagaatgtcccctgttactttagtatttttatggtcgtacaatccaatgatacttgaggcaattgtactcttaccacaaccagattcaccaacgatggctaaaatctcgtcgcgcttcagagtcagattaacatcgtctgccgcatcatagaatttcccttgcaaacggtatgccgtatgcaggtgttgaatatctaataaaagatcactctgcttctccaaaggtcattcctccatctcgagcttttttattaaaagcatttaatcttttctatttattttctaattctaaacacaaagccggtcgtatgcaaatcacgacacggctttttttagaaaattatccttgatgagacttaatatatgaaacagcatcaccaattgttttaattttttcagcttcatcatcaggaatttctgcgccaaattcatcttctagctgcaagataaattcaaccaaatcaattgaatcagcatccaaatcgttcataaaattagtgtcttcagtgatctcatccttatcaacatcaaaattatcagcgatcatgtctttaattttattaaaaatttcttcttctgacataaaacttctcctttttaataaaacattgtactatttttcagcgaattcgtctctaaaatctgcaacaagtttttctttaaccattttatctacttgcttaagagtgaaataaattggacgttcatttgatctaccgtgggttttaactaccggtgcattaacgcctagtaaaactgcaccgccatatttagccgtatcaaatttagattttaagcttgataacgagcccttcaccattaaggcacctaacttggtcattacaccgccatttaataaactatcttttaataaatgaagcaagacgctagaggttccttcaatgttcttaagtacagcgtttccggtaaagccatcggttactaccacatctgccttgcctaatagcaattcattaccttcaatattacctaagaaattcaaattactttctttaagcaattcataggccttttggtgaacatcatcacccttgtcgctttcagctccattatttaagagcattactcgcggatttttaatgccgcgaatcttctcagcatagtacgaagccatttcggcccattgtaaaagatattctggcttactcttagcattagcaccaacatcaaccatattgaagccatcgtcactattttgaacaggtaaagtaggcatcaaacctggacgaacaatccccttgattcgaccaataataaaaattccacaagcaagcaatgcaccagtattgcctaaggaaagcaacgcatcagcttttccttccttaacgaagttagctgccacaaccattgaagagtctttcttttttctgattgccttaactggttcatcttcatcagcaataacttcagttgtaggtacaactcctaattgatcattaatttgatcttcagggattagttttcttaatgcttctttatcaccaaataataaaaatttagtctcaggcattccagttttagcttgtaaaaccgccttaacgattgcatctggggcattttcgccacccatcgcatcaattgcaattgttctcatatattcaccacaatcttttctaaattctgttttgctctaattgcttatattctagcacttgcttaagtgccttatgtcctggatctaataaatcaggatcagccgcaaccaaagctcgtgcttctttttgcgcaacgaccaatgtattgtagttatttactacatcacccacacgaaattctggcaatcctgactgagccttaccaaacaaatcaccttcaccgcgcatctttaaatcttcttcagctaatttgaagccgtcattggtcgacgcaataattttcattcttgctttacctgaatcggtcttaggatcagctagaaagacacaataactttgtgtttgtcctcgaccaattcgaccacgcagttggtgcaattgacttaagccaaaacgatcagcattataaatcaccatcatattggcattagccacatcaactccaacttcaatcacactggtagttactaaaatatcgatctcaccagctgcaaatgcagtcataatctcatctttttgcgcacctggcatttgaccatgaagcaggactaccttgtgattaggaaaatcatggcttaatttttcatgcaattcttctgcattttttaagtctaacgtctctgactcggtaatcaatggtgtcacagcgtaaatctgaaagccttgatttagctgctcttgcatttgtcgatagacttccttcatttgactacttgttttccatgtggaaataattggctttcttccggctggtaaatgatgtatttcagagactgtcatatcaccataaactgtcaaagccagcgtccgcgggattggcgtagcggtcattgccaaaatatctggttgatcgcctttattaatcaaagcttgcctttgacctacaccaaagcggtgctgctcatcaataatgactagacctaattttttaaagataacactatcttgaattaaagcatgagtgccaattaccacattaatcgtgccatcagttaattcacggtagatctcacaccgctccagtgtttttgtattgcctgttaaaagagctactcgcacacctaaaggacgcaacaattcatcgatttttttgaaatgctgagttgccagaatttctgttggcaccatcaaagccgcctgatagccagctgtaatggctgcaaaaatcgcataaacggctacaacagtttttccagaaccaacatcaccctgcaaaagtcgccgcatttgaccatcagaatgcatatcagcaaagatttcattaaccacatgcttttgatcatctgataattcaaatggcagagatttagttaattgagcaatttctgtcagatcgtatttctttgcataacccatttgtttaccatcattacgggtcaataaagctaattgtaattcaaaaataaaaaactcacgaaaaatcgcacttctcttagctagttcagcctcatgactattcttagggtggtgcattttttcaataattacttggtcttttaaaagacgatattcttgccgcaacttttccgaaacaatatcctgcacttgatcaataaaatcgtcaatagccacattaattagatctactaattttttttgcttaacatgtcgattaaccggataaatcggcgccataccactatcattttctttggctgctacgaatttaaaggccgttaaactttgccgggcaacattgtatttaccataaatagctacttcttgtccgatctcaattttattttttaaccacggctgattaaaaaaattgaccatgatcacatcatggtcaattctcatcttgaaacttaagcgcgttttcttatagccaaaacgactaacaaacgcttcagtggctactattccctttagcattactttttgaccatccatgatttgatctaacggtaatgtttgtaattcgtcataacgaaaaggaaagtaaaaaagcaaatcataaatactatagatgcctaagcttcctaatgcagctgtagtctttgtccctacaccctttaagtctgtgacaggagcaaataatgcattatcaatcattgttattcaactgatactaagaagtgatatacaggttgaccaccatcatgaatttcaaattcaagatcatcatgtttggcttcaagttgttcaactacttcttgtgcttgctcttcactagcatcacggccaaacataattgtgataatttctgaatcttcatccagcatcttttcaatcatatcaacagtagtcttaattaaatcagcattgtcaaccttaatcttgccatcaacaattcccaagtagtcattcttatgaatttctacttcatcgatttcagtatcacgggtagcttgagtaacttcacctgaaacaaccgtatctaagtcctctgtcatagcttccacattttcatcaacagatgcatctggattgaatgaaagcattgcggttaaaccctgagaaatagtcttagttggtacaataccaaccggaatatcactaacttcagcagcctgcttagcagccataacaatattaccgttgtttggcaagacaatagctttcttcgcaccagacttcttgattgcatcaataaagtcttgagttgatgggttcatcgtttgcccacccgagataatacggtttaccccttcactttcaaacaacttacgaataccgttacctgaagcaactgcgatcactgcaaaatcaactgcttcttgttgttcttcatcttggtcaacgatgctttcgtgttggattctcatgttatcaatcttgatcttgcctaattgaccaaactgactaccgtattggaaaacatcaccagggtgttcagtatgaacgtgaaccttagcaatttcaccatcagaaacagctaataatgaatcgcccaagccagacaagtgctttctaaattcttccaaatcaaacttctttttatttggcacatcggcatcaagatcaaccatgatttcagtacagtaaccatttttaatatcttgagtagccaattggctttgaactgaagattggtggtgcattgcattgatcatttcatccatttcattttcgtcaggttgatattgatctgcaaagttttcacccattaagccttccaaaaagccttcatagataaacaaaaggccttgaccacctgagtcaactacaccaacttgcttcaaaacaggcaataaatctggagttgacttaagagccttcttagcaccttcaactacagctttcattacttcagttacatcgtcggtgttattggccttagtagcaccggcttgtgcagcaacacgagctacagtaagaatagtaccttcaactggcttcattacagccttataagcagtagcaacaccatttgaaaaagcatttgctaattcctgtgcagttaaggtcttcatcccttgggtagccttgtaaaagccacggaataattgtgaagtgataaccccactgttaccacgggcacccattagcatacctttagccaagctttcagttaaatcactaacactagtacttggattttccgaaacagccttagcaccactttcaatggttaagttcatattagtaccagtatcaccatcaggaactgggaaaacattcaaagagttaacaaactccgcatttttaccaattcgatgagtggcaacacgtaccatatctctaaattgcttactatctatctcatttaaaaccactatttaaaacctccgcctgtgttattcgtcaagtaccttaacgctttgtacaatgacattaacggccttagtgtctattcctaattgattcttcaaattgaacttaacactatcttgaacattcttacttacttcagaaatcttcaaaccataaccaacaataatgtacacatcaaccgtaatttcgttatcttctgacttgacaacaacaccgcgcttataattggcacgattaagaatcccgtcaaatccatcgcgaatggcattctttgatgccatacctacaacgccatagttagacgtagctgcgccaccaacaacagttgcgattacaccgtttgaaatatcaatcaaaccatcttttgtcttgatcttaacagccatgtttcgtcctccgtcttattatctatatatacgtttattattttatcatagtaacgacataatcaataattaaaatacacctgaaaaaatccttttagtattgaattgcgcgaaaacatatgataatctaattaagtatgacatcacaattaaaggaggtttagcaaatggcaaaagattacgtaacaggtaagaagactacattcggtaacaaacgttcacactcattgaactcaactcgtcgtgcttggaagccaaaccttcaaaaagttcgcattcttgttgacggtaagccaaagcgcgtatgggtttcaaccaaggctttaaagtctggtaaagttactcgtgcctaatagaccaagagcttgttagatcactgatcttgcaagcttatttttttacctaaatttaagttaaaaaccttttgtgcaacatttgtgcaacagtaaattattttttcttccttatataaagtgacaacacaaaaaagccaccccagggacatagttccccaaggtggcttattgcacgatatttggagtttcctcctatctaaattttcctagtgctttaccatacttgtctttagcaacgatataaccacatttaccgtttgatcgtggctgtcttaaccacaatcttagtgggccttgcaaagttgcatcatacttcactacgctacctttgctaagcttagcgatagctggtgaatcaatgtggggttctttgtgaattgctaaggcttcacctaagataaactcaccagacttcttaacccagttaggtttcttcttagctacggtcttactgcccttagctaattttttccagccttcaacagtggtattaaccaagtttctatccatgttatcaccagtgaattgccagatggtataagttttccatggtgatgttggaacgttcatattagggacattccagctcttccaattcatacttggataacatgctacccatagtccacatgtcttagcacagttagctacttggtttaatgcagatgattgaacataaactaaacaccatacgccactaagtctatgaaattcagtaacaaaacgtttcacccaagtggtattgccccagctacggttttcattgctttcccaatcaactgcaggaacagcttcaccaatatagccttttacattgtgatagaagtattgagcttccttttcaggattaccaccttcacaatagtgataaattcctaattgttttcctgcttttttagctgcttggtaatctacgtcacattcaggatttacgtaccacattccttgtgttgccttaatcatagtaatatctgtacctgattgtgtagcaaaactacgagaactatcggaatacacgtcacacattttaagcattagtatcagccttcttaccttcgtctgctggcttatcttctacagtatcaatcaaattttgtgttcttttcatagcagctacactcttttcaatttcaccgccaataaattggcttgaaggatgtggtaagtgagctaaatcaagaataccaagtacagtgttcaatacttgagtaaacttagtatcaccatcaccacctgatttttcagcttgatatacaagtggttcaacggtcttagccactaattgttcagctttagcaagttcattgccttgcatagctttacggtcaatttctactttatgtttagtatagatagctacaattactaccaaagctacacttgaaattgtgattactaaatccatgatttgattaatcgtcattttttaacttctttcttaattcatcattgtctttttcggcatctagccattttcttctgtagatttcagcgtcctgttctttctgcttaatttcttcatctttttgccgtagcagtgtggtgagtgactgttgtttattactatcaaaaactttgtaaaaaagcgttatagcgctaatcacaccaccaattgctgtaataatggatccccaattcactcatgacacccactttcaggcatcacaagcagttagataaacaaatccaaaaattatcagatctccccatgctgaatgccccattcgatagaatggagtaaagatgccatgcgttaattgcaataatgctaaaaccatacaaacaataccaactattacaagaaatactttactggcaataattagcatgattttgtatttagtattgctaatatacggaactaaaaaagcagatagcattaacaagattcctaacaaaattaggaagcagtcaatgtatctactgttttcaatattctcaaactgtggaggataaatgaagtagtggctgtcatgaaacagccaaacacctttacctaaaataaaaagaccaattaacagttcacaatttctaattgttaatttagccttccactggtttagcttcttcattgctaccaccaacgatttcttggtattcagcttgagtaattaagcccatatcaatgtaacttcttaattcatcttgactgataaaatcgttatcaaattcaaacttgtaaatctcaaacattacttattacctccttcaattgctggtgtggtgttttgtgttggttcagtaggttgagtagcagctgcagactggttttgagtcttaaccgcttgtaattcttttctgatttcacctacttgaacatttgacataatgaccaaagtagtaagcttatctaatttcttatcaagttgatcatttgattgagtatttgactgactgtttgattttaattcagtaacagcctcttttacatcttccacagtgtgaagtaaagcatcatctgaagtgtctacccattcatgagctgtgtaatcatatctttgatgtgtaaagtttggatttggagttttagttacataaggatagcctttatcactcatatcctttgtggtggtgtatggaccatcacattctctgtattctccattaataattccagagatccaaaatgtactttcatttaattctgccattttattttcctttctttaaataagtatgtcgttcaatatcaacgaccgcttatattatgtgctatctaaatattaaataaagtttgcattctacctcacccttaggtaaacaggttttgtcttatgaattaatccaagcttgtttacatttagataagcatcaatcatctacgccacctccttcaaagaagcagcataacaaagcctatagtgggcttttatccccccagcttagattttaatgcttgaatttcagctctaagatttaaaaagttagtgtttgcatctagcggatttggataccattgtggtagatcatatgactttgtaataatcattgaaccaatgttaattgatgctccagcatcattttcaattcttatcatcatcttattaacattctgcgtcatcttaaaagtggctgtaatccaaacccaatctaaagacttatttgctttgtaggaaataatagtagaatcattagacaaactattataagtagtgtttcctaccgtagctttaataagttgacctgtatttcctttttcagattgcgcataaacatgtaaatttccatttccagaaggattgtcgatttttatatatgcaccccatgttagtatttcatcagcataagctgccaatggttgacatatgccaccccaagaccagttgtaaatactcgataagttagaattgggatcttttgaagatgaaagtgaaacattaataacatctccatcgcttttataccacttaccgctaaaatcacttgaaccttttagtaaatttgatggttgtttatctgtttcgtccagtaatctaacaccatttgcataaatgctcattacgccacctccatttctgaaggtacgtaaagcattgatactagtgggttagctggctgtctacccgtaccagcatatgtaatttttgaccatttagcattctgcaacaaatcattaggcaatgtaacatcattttttgtaattagttcatcaccatcaacaaaaatattagccatgtttagctcctttctaaataaaaaagagagcaaatgctctcttacttactttttataacatggtcgtttatcatgaacgacagctttaattcttcgatgaatatctattgggtgctgccatctatagaccagcacctacatcttgagaagtaaagccatacactgtcaataccagattagtatatgaatagtttgaggtgtcgtcataattggattttgtacggacagctaatgtggtgttgtccgtaaaccaaactgacatagctccggaactgtcttcattatcacttcgcttgttatttattttaccgcgtttcaataacggtgtgtgaaaatcgttttcaagagcattattgtcagcatcttgataaaatacctttacaataatttggtaatattgaacatccgaatactttgcatcagcttgactaaaatattttgtcatatcaatagtaaaagattgatggttccattcactgttattatcaccaccaatacaaaaaatatttaggttttctgctccatttccattaagaaactcattttcacctagagcataacctagaacttttttgccatttatcgttaaagccatacggtcaccttctttattctgttatttcatacaacgtatttggatctttagtagcaagcttatcgtagtcagctttactaattacggtaggctttttcatatatcctgtttcaattgctgtaactctgttgttagtgttattcagatccgtttggttaaccttgcttgataaatcaacagtgatattagcattgccactatcatcagggcttatctttgcgccaccgtttacagtgatagttttaagcttaccagcgttgctaatttcagattcaagctgattctttaagctgtctgcatcagtctttaaaaataccgttgctttatcggctttaccgtccacagcgctttgcaaaccacttaagccactcacttgagtttgcaagttctgtagtgattcatacaagctactaatagtgattgtcttatcaccaattacagcactggttggtccatcatcaggatcataaatgccaattaccagtgatccatcatctgctggtttcaaactagcatcataagccgcttgaggactgtcgcacttgacaaacgacagcttagtggctagcttttgtgttgtttcagacttagtaaagtgatcagtattaatattgcctgaactatcaggttgaatgttatcaactgttttaactttaccagcttgcgcaagtcttaagtcagtttcttccttagtgtagtaatttttaatggtgtcccctgtaacaaactttgaaaagtctaccttatcaaattgttgtttcaaggagtccattgatgctacagtatcatcaacttgtttacttacagtggtaagtttttgatcgttagcactaatactatccttaattggttgaacagtatcattgaaatccttaactgtggaagtcttccacgagttgtaatctgactgaatgtcagctaattcttttgtcttttcctgactcaactcttcaagagctgcatcacgttgatcattgattgacttaatagccgctgtaatatcagcctgattactggttttaagatcagctaattgtgcatcagctttactttgaatagcttgttcttgactagcccaatcacttgccagcttattgtatttaatagagtaatcagtaaaatcactgttaatcttagtaagtactgcttgtgcttgttgttgtgcattacttgaatctttattcaattgatcaatagtagcttgtgttttttgagtagcacctagcaggtggttttccatagcaataagactacttacataactatcattgataggcttaacagttggatcaactttaacttgaaaatagaaatcttgtgtagtatcaacaatagtgtcgccttgcttaatttgaaagaaacaagtgccactggctgtataacattggtgagtcatttgataactaaagtgtcctttagttcgatcaatcatgttgaatttaccactttgctcaccagtaccatcatcagcaactacacgatcactctctttaatttctgaaaatgaaacatccttatcagttaaatcatagggagaatcatcttcatttaaaattgttacgtccagcactaaacctttttcagtagaacgtaaaaccctcgtgtcgtctgacacgggggttattgatttatccgtttttaatgttatcggtcttagactcactctctttcaccttctttctgtgaatttcttgaagttgagtatttcttaaccttaaactttgattttctttttctagtttcgctattttaatggattggtttgcaataacagttcccaattcatttgctacaaattgttctaatgtattcatttttataaatcccaatacttacttggtcctcgccaatattgcttaatccatgaacctaatacaggttgatcactgcttgttacaacaacattcctaccaccaatctgtgcttgattaggtccaatgtgtgtaatagcaccactatttttatcatgaatatttactgatccagatcccaaattcaaagtataatttggagaatctaaactcaaaccaccaatttcctgactaggatttagtaaattagtggcatctccaaccgcaattgaaatgccatggttttcaacgtgtaaaacaccgttaatagttcccaaacttgtaattgtatcagtcttaatgtgtgatgcatccaaaatagggatatgagcttgatcaacaaagaaattgccagttacttcaccacttgaatcatcaataccaaacaaagcatgtggattgccataaatatcatggaaattaaaacctaagccattaaattccatataagaaccatcattgtttttagctctaattgccatgacgttattccaactggtagagccatcactggaaataggttcaagcattccgccaccaccagacttcagaaaattatcaaagttatctatgttagtaaccatttcctgcatgtggttagcaaaatctttaactgattcatcaagtactaaggtcttcttgccagctttatcagttttatagtgagcattacctaactttgccattaaggtctcccatgcttgagtttgggatgtaccttgcaaagtcatagcttcctgaacagcaccaataaaactatttgatctggcaatggcttgacgtgtggaagtgattttttcattagttctatcttcactagcttgaacaagtaggtgttcatagctagttggcaaatcacctaaagttacatttaaaaaaacgtgggctaaacagtcccacgttgtagctgtaacttcagctttttcagtaatttcataatcaggaaaactaacatccacatagtcataaagacttagttgagtaaagtcctgatcattatctgacatgtcttgataatcaagtgatgtttgaacttgcatatgaccatatctgtgttcaattagatagttcttaccaatttcagtagcttgatcaatatcagcttgtgtagcaacaaaactaccatcactttgctgaccgcttaaatcctgatcatcatgtttgaagtaaccactaatatcaacagtattaacgctatcaatgttaggatttacaccaaatccttcagcataaagtggaccaatcttaacagttacttccttattagattgatcaacatttgcgttgtagttggtgtcagtatcagcggaattatctgtatcagcatctgcagatgtaatatttgaatttttgtcatcaatatcatcttcacagagccatccattttttcctttgtaagttacttcaatgtaagtcttgccatcaccagattttgcttcatgaccattaacaacagtgaatgtctcaccattaggaattgaccagtttaaagcattcttactgtcaggagttgcataaatttcaaccttggaatgatctttaagttgattattaataaagtcatcaaaggaatgtggtttaactgaaccatctttagtgtagttaattgaactagattctacccagccatgactcgtgtgcatgtaggtcttaccgccttgagtaattgttttatcaatagtagacatcccttttttagcagtaactttgactttcttttgcttttcggcccagtaattagcatgtccgtaaactttatggcgtttcttgcctttaccagcccagtgccatgcatgtttgccactaccttttttaataacagtagtattgctagacaccattttatggtccttagtaaagtgatactttacagcgccatctttaacataaccataaccagagttgctgtattgacggtagctgtcttcttcagtaagtgataagtgtggtccatacagccattggtgtggtcctattctgtaccataaatcaccgtttgaattacgttcaaccatgtcatagtcaacaacagtaccatttttaacagtccagtcttgacctagtgacttaacaggatggtgatcaggaccaatttcaggtgaataaaatactctaattgattttcctttgccgtaagcaactacagcagagccatgaacagtaacacgagaacctacaccttcactatcaaacggattactgctcttaacagttaccgtcccactgacattgttaattgcataagcacctgatgtgtcaaaattgatccacttagaatcaatccagccaccgccatcactttgtgcaattggataccagctatcgctattaacagtgttaatttgatatttaccatcaggagtaaatgaaccatcattaacaatctgacctaagtgcagtttcatcccgttttgcaaagtaccaatgatcttttgaccatctacaggacaatcatagatattgatattgccgccagccatgtaagtgatacctaatgaatcgtaagtgctttcccatgtagcccagccttgccaattatttttcgcaattgcttgacctggtacatacttagcgacaaataccgcaccagtatacatgttctgaatgttcttatcttgactaaaggtggttttgatatttttaccataggtaactttaataccagaatcacgtccaatacgttttgaatgtctgatattccaattatcaaaatcaaattcaccgccaaacagtcctaaaactgattgagtaacagtatcaccttcctgatcaggatcaataaacaaattacttgcctgctggccgccttgaatattcactttacttactttgttaacatcggaatagaaagtaaattctctctgctcctgcatttgattaaggatttgattgcctaaatcttgtgcagttgcgccgtttaattgaatatcatcagcaacagtagagttagcaagtaacgcactaatgtgttccgcttcaaccaccacattatctaattcgggagtaatgtggatgattttaaaccattgatgtacgtgcttaggatcacagtcttccataatccatttgttaggttggatttccttttggtgcaatcctgatcttggataagtcatagttaaagaccaaaactgattagaattgccattaacctgacaatcaattgcatcaggaagaggaataccgctactagtaaaatcactggcaatactgtcataaagatgtggcattgtcatcaaatcagagtagtcaccataatcaacttcaggaattgtacctacagttaatttcattagatcaacctcctccaatttggtttgtattcagctttagtgatagtagtgccagtttcagcagtaacagtgatagtattctgacccttccacaatttaggagtatcaaggttaggaaaatgagtttgtgtattgtatagattgccatctgcatcataagtatcaccagtagcaccattaagccaaaattcaccttccatattctcaaacgtgtaaggcaagccattgacgtacaaagtgaaactaccatttgcaatgaagtgccaatcaggaatagcagaccatttttcttcaccaactaccacatcgctatcaggcaatgggatataagcaattccatcaatacgatattggaaaggctgacaataaaacggtattgcacatacaccaacaaaatcactagttacatctttagtaacagtgaatggatctttaacaatagccttaaacacatatgttggatcagcagtgaatttaagatattgatatttcatccgcccatcaggatcagttggagcagagagccaatcagttacagaccgttcccaatcaaaccaaccacgttcaggtggtctaagaatttcaagattaaaggtttcagtcacattttggtaagattgattattttgtaagaaatcaccatttttaccttttatatgtgtaggatcaatgtcagctgttggatgaattaaatcccatggcttttgtacgaccatgccaaaatctgttgaagcatggtcttgaaaaatcagcttcacattatcatctaaatcttgcacttaatccccttctttctttaatcatgtcttgtctacggtcttgcttgtagaacggctcaactaactcccacagcttgcgaccttcaggagtttcaagtgtgatatgaatatcacggttttgagcgctcattttttgcaaaactaaaagcatggcttttaataagtcatgctcatctttttcatctttattagaaatacgttgttggttagcatttaaattactgttagctgtaagaatacctacagccttgccaattaactcccaagcacgagttgacttacttggaataagcggaacagccatttcaggtcctgcttcaccaaaaatacttggcgaacttgcaatacccccattagcataccagtgagtagaagtattaaccttgtgttcccatgcagctttagcagtaccataacgtccacggatatagtctttcatccatctcaattgagtaatagcattagttctccaatctctaccagcagatgccattttgcttgctggtaatgattgtggaataccataagcgccacttgatgggttagtaattctaggattccagtgagattcacctgggattccatttccaccatcaataatcaattccatataatgccaccaagattcaggaatgccggcttgttttaaccagtgtaagtgatcacctgtaggctttccacctataccatcttcattttctgacaagtgatcaccaatccaattaagagcttcaccaccaagttcacgtttagctaaagctaacaaactaggtttaatcttaggttgatgcttagcttgatcgtgaagacctttaacacggtagtaaccatagcccatagacattgcatcagaaattctactgatacgtgcataaggtggggtttcattaaacattgtgcctttgcttggattgttgataataccaacgtgaccagctgcaccagtaccatgaccaaaaatgaccaaatcaccaggctctgttttagataagtttttacctaaatactgaacacctgatgattcctgcatagcaacagtagtacgaccaatgttaattccaaaatgtctaagtgcctgcattaccatacctgaacagtcagataaggtccttgacgcagcacccatttgatacttaacacggtcaaaagtatccttggcatattgcaagaacttagcacgtgaaccaccaccagagccaatggctttattgataaccgtccacatggcttgagaccatggattaccaaagtaagtaccagaacgtttactcaaatcagtagaatctttagttaaattagaaccaacatcatcaagattattggtaaacattgatttaaagctatcagcaaagtgctttaagctgttttctgctaactttctaagttctttcttgctaatgccagtaccatttgcaaagtgtggaagtgagagtgattgagtttgagtaccattaagaacaccccaaccttttctcaatagcatcctacgattattcccatgaggaataataatgtcattttgatcagttactacagcttcttgacgtggaccagattgagcatcattaacgactgctaaagtgtcatgagttaaacgaccatttgcatcagtacccttagcaaagtggactggattaataacagaactattaccaccaaattgctttaatacagcatcaataccacgaataccacggttgatttgtctgattgtgccacgcattgaatcagatgcataaccaaccattttatgcattgcaccgccaaaaccacgagcagtagcagtgcctaatttgattacaccatcgtgcaatctcttaacagattggtaagaccgtttataaagattactaaagtcttgttcagttgattttctgatcttatcagtagttttaccaacacttgaagtcattgacttgaaatctttaacagtcgctttagacatgctagagattttcttggtgaaattacctttgccttcgagtgacttaacagccttttcagcctgcctagaaatttgttcgccaaacttatcttttttagcagtcctagctaaaacattaagacgtttttcaacagtattaatgtttttgtgtaatgactttaattggctagtaccttttgtttttacactaacagtactctttttgcctttgatcttcttgattgccttagagagtgacttaacagatttaacacccttggtttttacagtaaccttatgagtgccacccttaatacgcttcatagccttttcaagggctttgatctgcttagatccttttaccttagcagttacagatatagatttactgcttaaacctttaagtgatgcaccagaagcgctgatacttggcacagaaacacgacttgaaccagatgaatatgaacgtcttgatatggacgttgatcttcttctagttgatttacgtttcttggtcttacgttttttagtcttctttgttttaggagcagtagtaagtttcttaaataaagcgtcactgatccacttggacttgccaattcgactattagcaccaagtaacaatccttcatccacaagcgtttcaccgtgatgaggattggtcttagcaacagctttacgttcttgactgatacgactagtaagcttatttagctgtgcaattaagcctttggtatttctaccacgctttagagcgtctctaatttctttagcgactttagctctatcagccttatcatattgttcatgcttaatcagacgcttacgctcattagcagtagcactatcatttttatcatgacgttctttttgcttttgatgacgcaaacggtcttcatcgtacttcttcttagtaagcttagttaatgtagtaagaatcttaacaggattcttagtttcaaggctataaagatcaacagtaccatttgcaaggtgaactgatcgaccaaacaacttagccatatcacgagcattaataacgtcttgccatggaaagatccaacgtggtacattcacaccctgttgaacttccacagaaccatcaggatttaaaattccttccttattattagtagctggtgaatcatgaccatcatttaagatagctggatagccatatttcttcttccaatcagtaccactagctaaatgaagtgatccaaccttaagttttccgtggaagaacttattgacgttattggcagcacctttgatgttatcaatagcatgactaaaagtactttgaatgccttttaataaactcgaccagaagtttttaagagaattgccgaaactcttaaaaccactaaaaactttgcctagtccaccatgtgtggcggaattgagtttcctatataaatcagaagcattcttatgaataccattccaaattcctttagcagttcttgaaatattcttccagttagctgaccatcttcgtttctcaatagcaagttgttttttagcagtttgaccaacggtcttaaacaaatcaccgtgatttttctttaaacgtttgctaaatgaagcaaagtttttaatcgtttctttattggctttgctattagtctttatgtaagatttagcaaaacgagaaacagaccgcataatctgcttagtacctttagaactatgtttatagacattatcccaagctttcttaaagttcttggataatgaactcttgaagtggttaactgctttaccaactttacttaaaccactcttgatgtttttaccaacaccattagcccactttctgaacttaggattattcttgtaaagcagtgctggaatgcctaacaaaggtgaaactgcggtcaatgctaattctttagagtttttcttagcaaatgacttaccttttcttaatccttgaccaaacttcttaccaacatctgctccccacttacctacttttctaaaagtatcatgggttgaccagcctaaattttctaaactccagaatttcttaggcggtttattgcgctgccaacctttggtgaaattattgacagcttgaccaccccaacgtccagcatatttaccgataattgcaccaattggagcaagcattggaccaacaactggaatcatgctggttaatgtaccaccagcgacagcgccaacagcaccgccaatgtcttgacttctagcattagcactgtgacggtccttaacagcatttatcacttcaggtgttgcaactgcagcgcctgctaaagcaccagtagcaagacgcttacccatagagaacttagtagtagctttaattcctgctgaaatctttttgcctacttcttgaccaaacttttttgcaaaattaaagccagacttaattttgctccagctccatttgcctgcctttgctaaaacatttcctgtagctctaaaacccttagctattgcttttccagcttttgtacctaaatcgcttgctttaacccagcctttttcaatacctgtccaagctttgatgccagctttttctacagtagtccaagttttacttccaacttttctaaagcggctaaaagtcttggatagaacgccaccaaacttagcccaagctttttcacctttagtagctttttcagcaagctcaatacctttaaatcctgatcttaatgctttaactgacttgtaagcagtaacagcacctttaccaatagaaaaaagaccgccactgactttaccaatgcccttaattgctaccattgcaattatggcatcagatatagtcttaacagcagtcttatttttagctaaatcagcagtagcagtagcaagcgtatgtaatgcactacttgaatctttaccattacctttaccaatattttggataatagctgcaaagtctttccaaacagccttaccaacttccacacctagagaaacaacatttttagtgatagctacaatatcacctttatttttatctaagtagccaataacgtttgaaatcgctttacctagttggttagcaccgctcatgacttctttactggtcatgatgttctttaaagcttgaagtcctgaagtcttagcatcaaaaattggcttagtaaattcttgttccaacttttgacgtgctacagtcatagcctttaaagcaccagcttgactttgaccatagcctttaaaactttcatcagcatatttagatgacttagcaatccaagtttggaattgtttttgtgttacatcaccagttttaagcaatgctctaagtttgccctctgacatgccagcaccacgtgcaagtgtagccataaaagtaggtgcagctttggtaattctacttaaggaggaataagtaactttgccagtagagccaattctttgaagccctgctgacatttggtcaatctgttgaccagtcattttagagctatcacctacaccagctaaggctttagacatttgcatagcgcctttaaagccaatggttgaccagttaagcatgtgagcctgtaaatcggatgctgaatcaccagctaaattagtgttagactttaactcaccaatttgcttatccagggcttgaatctgtctagtgttcatgcccatgcctttgaatctaccattgatcttagcaatggctaaattcaagttcatgccctctgtataagcagatttaaggcttgatcctaaattagatacagcattgcttacagcattaccaagtgcagatcccataaacacttcacgcaatgttctatgagtttcttgactttttttgttaacactagaaattttagcttttaatctatcccatggtgtaggattgatttttctttgttcttcttcaagaccactaacagctaatctagctttgtttaatgaagtagctgtttcattaactctgatctgttgacgtttgtaagcttcactggtagcaccagcttcactagcaatacgttttaattcacgagattgaatttcatattgcttagttaaattattgattgaacttctataaccagaaattctagcttcattagctttataatgattgccttcagattccaaacgatcaacatacgattttgaaacagccgtagtggtttttaaagtcttttgagcttctgctaatcctgacttgtagtaagtgagagagtttttagccttatcctgttgcttagtcagtgattctaatctactagtagctttcaaagtttgagtagcattcttttgaagtgcagtactgatactttcataagcttttttgcccttatctgtagaagtatcaatttcttcttgctgtttctttaaagatttttgcttttcaactaagccatcaattaatctacgctgactttttacagcatcagataagcctttgtacttagcttcagccgcttcagtagtcttaccagcacttcttaaaacagcttcttgagctttccatgcactggtagtactagatacagcttgccttaattctcgtaacgtttttacaggctgatcaccgtttaatttaatatctgtaatcagtgcaccaactggtattcttcctgccatttatttacctcctttctgttttgtctaaacttgctgcaaagtcccaaagactcattggacgtttgtcctttggtcttgcactcattacttccacaagacggtaataatcagtgttttcataatcttctagggacatatgagcattaacaatcatttgttgttcttgataatcaaaatcttccagcatttcctcataggcatgtactggatcaggatcattaatcgttgtcgcttttggagtcgtctacttgtaagatttttccaattaaatcagtaacaaattcacttacatcttctggagcagaatcttcaatcttatctacttgtgcatctgataaatgcaaaatcttcttcaaaaacttttcttcttcatccaaaagattttcttgtgctgttaaaacatcaagaattgattggtcatcatcgtctttaaccttattaattgcaattgataattttgcaaaaaacttttgtgcctttaaacatgcacgtacgttttttacagttgcttcaacttcaaaagtagttaaatgaagctttttaccattgatttttactaacattgattgattttcctttcaaaaaaagaaaaagaacggctttcacaccgttcttaacaaaattatttatattaatttgccaccactacccaccctgctaattattagtgagtagttgatgatgaaggaatagtgtccttatgagtagcatcatcaggtcccttgtgagttggatcatcagcagttgaaccagttacagtacctgaaataatccaattaagcatcttgtcgaagtcgaatccatcttcatctgaatagaatttttcgtaaaccaaaccatctgatggacgtgcagcggcatttaaagtgaaggtatcgtgtaccaaagttgggttttcattatcagtacccatagttaaatcaccgccaggtttcaaattgccatatggcaacgcaaagtaaagatcaacgccaatgtttgagttatatgagtgagcaataacaccaccatatgccaatggggttgagtccttagccatgttcccaaagcctaacttgctgtccttttcaagacctacaattgcatcatagaaattgtgcggaatgtcgttagcaccaaaagtaccagtaatttgatatgcaccaaagtgttgttcagcttttgcgttagaaccatagacagcttgtgcagtacgacttaaaccagtgatgttagcttgagtagcacctttagatgattccaaatcaatcttaaatacaccatctttaccaatattagtggtcaaaccacctttggattcatcggtaactaacttaccgtccttgtcatatttgaaaacaagtaaatcatttaaaccttgaagttccatttttctctccttttaatttgaaagctaattgttggctcaccagaattagggtcatatgtgtgccctgtaaaactagctacgatttgccaaccattagctacgaaaaaagacatgagcgagtgttcaaattcgttcatgtttacttttgtgtttttactataaaaaacgtttatcgctaaacgttgtatctgttccgtgtattggttactacctgattctgtaaaatcaaaattcacttcactaacaagtatatccacagaatcacgtggagtacgctcactagtaccaactgcaaaactgtaggctttatgcaatttaggaagattagagctgtttagcaaatctactacctgttttgctacagtactcatttatctaaaatctctctgaatttttcagcattagcttttagtactgcttctgcagcttccttttctgcatgatctttaaaatgaaggttggatatttctttttgagacatatcacgtgtcccatcatttacaaaacgagcgaccattgcattatatttatcttcccagcctactgaagtatcaccagtattaccatcgttgacttcataacctgctttataagttatagcgtcacgcatgtgtttagacttacggccatgaccagctgaccgtgcatgtgcatagcttgtatgagacattggagtgttctttttaagcacttcagcgtaagtcttagccccttcaccagtgatagctgatttttgactagtagatagatcaacttttttagtgatcttatctagccaatcatttaggcctttatctaaatcaaccatcacggtctgtcacttttgtgagagttatgagatcgcctgcagttggattttgaaatggatcaagattgatgtcactcacttcatacaatttcccattgtattgagcatgagtaataccatcataatttctgcgatggtgaataacgacaataaaagattcatcgtgatgatgtccttgattttgaatcatttgagtagtagttaagccccatcgaccacataaagtagggctagttaatgctttaaattcattagtaggaagtccattatcatcttcactatcttctacagtaccaaaagtgatcctattactcagtcggtcccatgtctgtagttgtaccatcgtcattcaccacctttgtttcatcataggccccacggagttggcctataatctgcttagccgttgtacttgatacagcagatgtaggatgcaaaaaccaattagccgcaattgcattaactgctaacttatacagttcaaatactgattcagttttgtaaaaactttcatcagcatcttcaccaattgcgccttgaacataattttcagcacctttcaatgccgttttcatacgttcttcatcactagaatcaagcgcatcatcgtcaggtaagtaaccaagtgagcgtttaagcccatcatcaactgttaagtaagtggtcatcattgatcacctaatttctattagtgattagcagatccagcttgagtgccaccgttatcagatggaacttgaactgattgcataagcattggttgactctcaaccttgtcaaatgaaccagatacaattgcttcatcatcccaaatcttggtatcaaatctaagcaatgcacgaatagcagtttgattacgtctaaatgccttatcagcaatgttagaagtaagcaatgacatttgttgacgatcgtataaatgaataaattccttaaagttaccaaagtagaaggggtggctttggtacttaccactagcattagtgttgttaggtaaccaagtatcttcaacgacacgaacatttacatattgcatgccgtccatattgaaagtggtttgttgagtacgtgggtctacactcattgcacgtgtaccatctgacatacgcactttagctaatgctaagaaaccagatttattagttaataaagtagcgccaccccataaagccatatctaattgacctaaagcatcaataatatcatcgagcttagtaatagtagccttcttttgtgatttaggaagtaagccaatgatctttgaattataggtaacaacattcttacgtgcaatatgttggtttaaccatgattcaatatttgcatttgaatcattgattaaatcattaggcgcaaagaatacatcaccgtagtcgtggatgttgtaactaagttgcttaacagaactatagtcgccttccttaatatctttatcttgccatgcgtaagttgagttattagttgaatcatcaggaatatcatccaattgatccattggggtaatatttgaaaatggttcaatatttctagttccatgattagtaccaacgttttcaatagttaccaaatcacgtaagtcatcatattgacgcatcaaagtattaatttgagtttgttggtcgtctgggatagtcaaaccagcgttaccatctgaagttgaacttgatgataagttttccatatacttcattggatgtttaagcatatccttgaaaccagaaataacatcctttgatttatcttcagtcttattttcaataggctttgatgctggtttattaaccttttgagcttctacagcatcatcataattttgtttagcaaaattacgagcttgaaccgctttgttataagcttcagctgcctttttcatatcttcagcagaaacggattcgggatctgcttcatagttcttttgcaaagctaccttcttattaaagagatcagtaactttattgcctgcttcaatccaggcattttgtaattcttgtaaattcatgtgttctcttctttctattgccacaataaaagagacaagtcttttttgacttgccccttatctgtatcttcttgtttattttcaatgggtttagagtcagcattggactttttatcatgaattaatgctttaatcttacgaattgcattgtcacttaaaacgggtactccgtaagcattcacaaccgctggtgcttgatcattctcaaacataatagaatcagcaaagcctttatctactgcttgtttagcattcatccaagtagtttcacacatcatacggtaaacttcttgcttatctaaacctgttcgcttgctataaagatcaacataagcttgatccatagaatctagcgattgcattgcactagcaaaatcatccacattgccttcaacaccaccgctaactctatgaatcatcatttgagcagttggcgacatttcaactttgtcagccgctagtgcaatccatgaagcagcagaacaagcttgaccaactacttgagctgttacattacctgggtacttctttaaagcggtatacatttctgagcctgcatcaatgtagccaccaggtgaattaatctctaatgtaatatcttgaccattagcattgctcaaagcctcatttaattgattagggctagtcacttcatatcctagaaatgaataaatatcacctaaattattgggtacgattattcccttgaccggtactgttgtcatcgtcttcacctccttcatttgctggaattattggtttatcgggagttggcaaatcatcaggtaaataaccataatgttgcaaaacataccgtccttgattgcctgacaaaatacccttgcttgataaatcaccaatttcagatgcaaagttatcaccagttgcatcaatagctggtctaatgtcataagtaatttgactatttaatttattagacaattcaccttgaaccgcaccagcatagcgattaagagctttagcatattgcccaccaatttgagtaatattactttgctggtcgccttgaccattaaggtaagaatcaggcacgccatagacctttgcaatttgcttaccagtccaatctgcttgtgaaagtaacttagctacatcactttttacttcaagtggctggtaagtttccaaatcatctaagacaattggtccattatcagaactattaacctgacgcataaactcacgtgatctagctgattttttcttccaatcaagtaaaccaccgccttgaatacttaaaatcccaggtgcttccacagattgagagagagcatgtaatgttaaacgattacttgcattcttgatattcaattcattagctaacccagtaagcggagaaacaccagtcttaccaccgtttttggatacaagcctgatatgaataacatcgctttgcggtacattctcttttggctgaatatcaggctcatcaaaattgatgttatatgttagccctgagccatcttctaaaagcaatgtttggacctgagacggtcttaaaaactcccaatataaatcaacgccattaatatttctccacctgtaggcataagcatttccgtctagcagtaactgtgcaaacattccttgccagaaactaaacccattagtcaaattagaaggattatcaattaagttttgcactctatccttgttagcattgagtttaaccaaagctaaatcagctgataattgtgaaataagtgaaaatatatctgaattttttaaagctgtatctgcagaaacataattgctagcggataaatcatttttaaacaaagtaataaattcaggatcatttaagctataaccagttacattacttttgtttaaattaaaaacaggcattattaatcaccccctccctgtccatgtggaagtagatcaattaataagcccgtcaaaagtaaagcaattcctagacctgcgaagcctgctattttattccataaaaaaagagctataacaataaagccaaagcccaataaataaaggattacatctaagaatttccaaatatctttaaacagtgttttaattatcacccgtttcacctcctaatagaccagaatcaggattttcaaaccactttagcacctgctcttgtgtcattctttcaacttcatgtgacttatcattaatcaagccataattttcaaaattgtacatagcctgatacatggcatctatttcggcgtccacaacatcaattttcttggtagctttatccttatcaacttgaataccaattttatcttctttgattactgcattaagcaaagccatttcttcaattggatcatcaaaccgtgtaattttgccagttgcataagattcttgtaagaacttagttgggttagctaactcacttgtgcgttgcgctatgtcttgaattaaccaccctgtattggcatttaaactttctgtgatgttcttaacctgatagctgccaaaacggtcataaccgaaaaatacgacttctagcctatgtttttgaacaaaatcaagtatccaattgtagacttgttcaggattgatgatgcctttttcatggctagtgatggtgcagtaccctttcttttcaagttcacgataaggaagaccatcttgtttttcttttgcttcaatactccctgcagcttgccatggaataaatgaatgctgcatcatatgccatttgtgaacaccatcagcagtagtataaggaaatgcgaagccaacagctgtattatctgaaaacattgagtagtccaagcccatgtagactcttaagccgtcaatctcaaaactatcatcaacagcgttttcaacatctttaagatttaagtagcttgcggttgactgtttcaaccacagatttaagttcttgttctgaaatttgtggagcgtgttggtaagcatcccttgatcacgttgtttaatcagattttcagttctacgcttacgttctgaatgagataaaccaataagcggatttgatttttcccatgtttcaggcttgaaagtttcatcaaggttatcttgcgcccacaccagacagagagagttatcaccttcacggtcataatctttttccataacatgctgtaatgtaatttgttcctgatgaaatggactggtaggatcaggataagccgaactgatcttgataaattgatggtatggaattacttgtgcttgaccatctgtaatatctgtaattctgtcatatgtattcaacgcaccagtttcatcataaatagccaaaacgttgtgagttgaatcatatttatcagcttcataactgattttccataccttattgttagttctcttttcaatgatttggttagtttgtaaatcaagacctgattcttttgcgagggatgcaaaaggttcaatcttaattactgcttcaagcattttcttgatataaccaaacagctttgtagactgatcagatgtattagcagtaactaaaaagtctttgttggtgtaattcaaagtatcaatcaaaacagctttacacatctgaataccagctatttgtgtcttgccttgaccacgtcctactgaaatatgaatatcagtaaatcttttttcatcattttcgtctttccaaccgttaatcatagcaagaataaacttttgccaattcattaatggtagtggtttatgaaggtcaacatctggaacaattgacgcaaatttaagagtatttctaacttccttcatatcgtaatgatatggaaaatcaggttgaccttgacgctttaaatcttgaagatttctaaaacaagcaagcttagtaatataacctgcaatttgcttaccatccaaaacgtcaaaacagtatttaatggcatcgtcattatatttaagtctgatgtcattccaatcaattgattgataagcaccttccacatcatgagtttgagttagatcaattttcacttcttaaaccacttcctttgagtaaaataaaaagctaaatcacagatttttgtgatttagcctattaattattaacaaaacagccattttgttaataatgatgcaaatttttactgcatttaactagcaaatagcttttttataattttagaatgccgtctttttatataattagctacttctctaatctgattaattggattcaaaacatctaaatcctttcttacccattttccatgaccgtgcttaacgtaaatcatgcgaaaaactcctttaaacttgtaacagttgatttagcatcatcatttttaggtgtattcagttccatcatctgacttctggcttttgggcttaagcccagttctttacctatcgtgttcatctgctttagcgaatcagacataatctgataagctggatttttcttgtatccttgaaagttcttagctgccaccttcccatccacaggagagatgacggttttatagataggttgctgaataccatgttcttgaatatcgtcataagccatgcggtaggtgtcgtaggctgaacagtattgttgaagtaaatattcatcagctcgtaagattttgtcattcttatttagataagtggcaagctttggatacaggtatttgccgtaagttccaagccatttaggtgcttgattaggtacttttggctttgatagatcaactttgttcatgtttcagccccctttcaaaagctttcaaaattttgtttgtggcacaagcgaacggcactgatgcggctccctagacgttaaaaaacggggcgggggtctttttatttttgattcatgtataattacacttacaaaatttaaatctcttagaagcgaatttttagccatttacagcgtgatcatttttcaatctagccgccaagttagcaatcaattttacgtccgttattggcggattatctgttggcttaccatgcaaacccgtgccatagtattgctcttcaaagcgagttttccagtagtggcattcctgacagcatgtaacaagattttgtaagtctttcatgtgatctgggaacctttccactggcagtacgtggtcaattacgttaccttccttaacaatgcctaaagccttacagtaccggcatagactatagtcacgtttaagaactataagtcgcatgtctttccattgcttagaatgataaaacctattctgctctgctttaattggattgcgattgcgaactactttgttgtaatacctttgtctcgttgaattgttatatctatggaatcgataaaaattattacgtttttgcagttctgcttcatgctcaatatgctttttgcaataatgattcggcacataagcaacagcatgacagccgggaaaacggcaacgtctaattcgtggcatcaactcaccccttttggcaaaacaaaaagccgacctaagtcgactcatgtttgcacgctcgctatgtattcataaataatatgcggtaatgtttgattataggtcatcgcatgctatggaacagcatcaattgaattatgacagttaataaacacggctgttcctaaacatagtcacggatttgaaccgtgaccatgcgaagaaaaatctaagattgtttgtcgaatttcattcacttttcgacaatatcaattatgcactaatttccaccgatcgatctccgatgaaagtccgcacagtttccgacgaaagtccgattcatgcatacacacgaagatcaacaagattatcatcatccacatcacattgctgttgatagtagtcatatgcatcagcaaattcaagcagtgaatcaggcttgatacggttatagtactgtgacttttcataaggcaacatcctaataatttgttcttgatcatagcaataaacatagttatctattaatactgtcttatgtaattctgaacaactatagatacttttatatatagcttttattacttgttcaatagataaagcactaactatagatgtttcagcatagttgtgacccgtactatgacttggtgcccatgatagtttaggacttgataaatctattaaatcatgtccgcatcttcgtaataatctaggcaattgtttagatagaaatcgatcaacattgttagcagtagcagaataatttacttcagcaaataaattcaaaataaccaactccatataatagatatatagcaattcgtaatatgtctattatacttcataactaatagctatcgatataccgcttaattgctttagttgcaatcattggcattgattcattcagtctatcggcataatcttttaattcttcataagtatctgcgtcaattgttacttccatacaatcacctcttctattcatatccgtagccaactaaaccattctctacaatctttaatgcatcattagtatttcgtgcaattccatgaataacattgaatttcattagcattttatggaaagctatttgatcaggacgcggtttaccagtagcatttttcacttcaatgtaaaaagcttgatgatcccaatcacgccagccatgcaagtcaggatagccagacggcaagcctgtagtaaaaaatctaccatcaggcgttctaattttaccgacattagcacggaatatatgacaatgatgttgtgagacaactaattcaattttcttttgtatactatgttcactttccattgataaacccttccgtgttgaaaattgcgtctgattcattaggcaatttcatcagtaatttcatgtcatccatacttgcatgttttttctgtaagattaactgtgatgctttaagtgggtagaaatcgcctaaaaagtcatcaccccaaacaccattttttcgataaggaaaaaagtactcattagcgacttcatcataaagtaatgaatctggataaatttttcgtccattcttgtcatgaaaaatagcctttttattatttaacatagttgttgtcctccaggttatgaattctttttgcaagaattacaattgattcccacataaaattatcttgtgcagtagctttatgttgcacagcttcagttaattttttatttgcttgaacttcttccaataaagaatcaaataaatcattacttttatgaatttctttcataagatcgttgttagacttcatggttttataatctgaaaacaaattcagtacacttatcgtagggtaaagaattgcaaataatacaagcagtgcagttttcattacttgtcatccctaactagcattggcttattatccttgttttcttcaggaataagttcctgttgatcagcctcaagacttacttgaactccattgccatcaaaagcaatgtcttttaacttgtttaagttaatcttatgagtaagcaggtctgcatctaattgcaaaactactttattaccattaactttgaaattatttgttgttgcttgaaatttaattgtttttcctgtcatgtttattatctcctgttaactaagcattaaatatgtaaacgatatactggtccaaataaacataagtaaatctaatttttcatttttaaaacaaaaagaaattaagactattaaccagttcattaaaattaatgttaaattgaaatattgttttgctgtcatttataaccaatcagttacttcatattttgcattctcatccaattttcgcccacaattgggacaatacttaataggataaggcaagcctttaatcgttaagtaccacttgtcatccatttcatttagattaacgtgaaatctattcatttttggcgcatataaatccggtccatcgtgaaaagcatttaatgtactgcaaagatagcagctacttgaaactgatgtcattcgtcttcaactcttttcattagttccttcggtggtcgattatatgtaacatgttcacattttgtacaaatataatagtcgctaaggctaaacagcgatgttttatatacataactgtgatgacaaaataattgcttaaaaaatagtttcactctgtaaaataaactaataatcatttatctaatctcctaccacacatagaacaaaatttgatttttttatcaagtttaaaggaaaagtcatcataataatcaataagaaccacttctagtgaattatcttttctgataaataattcacagccatctgtataaaaagttttcatcggatcctctgatccactttcaaaatgacaatatggacagatgcttttttttgaaactgcattcatttttaattttcactttctagctttctcccacacataggacaatagttaatcttgctactctttgatacataagtaacttcgacatcacaagataaatttaattcatttccattaatataaacatctccattttcatatctatcaatacctgtgtacccatcttcgtatgtatcttcaattgaaataattgatttttcattattacagtaatcgcacataattattcctccgttaatcagtaatcacaatgtatgcattcactttttcagcgtggttataactattctttaagtccctagccgcttctttaggtgagtcaaataatccttcccaagtttttgcttcattgtcactactactgtgtatagttacaacaatacaacgatcttgttcataataactatcataaaaagtcgagattctaaacagattatattcatctggatcattatcccaacacattaaaatatcgccatacttgtaatcctcattagttttcttcgttcttttatcaattactttcattgccatactcctttatgtactcctgaggcaacataccatattcattaaagaactcaccacatagagcaagatctgatcttacacagtaatctgtagccattatgtgtctagcttcttcaagacccaatttaatatcacgtccgttttcatctttcattttcatgctcctttaatcaatagttatcgttagcaaactatatctagcaatgtccatatctccgcaataagggcaatgtttaatatcatcaatttcagcaataataaattctctgccgcaatgttcacaatggtattcagctaaattatgattgttcattttgatgttctttctttaaattgcgtccacaccagggacaattacctataaagattttgtcagtttcctgagaatagcactcaggatcaggatgagaaataattaaagctggatgatttttacaatcgatgtaagtaaacattattccgtcttcaccattcaccttattaatctcatctggatcaacatagtcatctctgtagtagtcgcgtcctagctttgtctttgggttgatttcacaatatttacacaaatttaaatattctttcctctcaagtgacttccacactgatgaagtgtagtgaattaactgataccgtcacaaaaaatatcagcggtgagtttttgtatagcattgctaatgggtaaataccgatatgacatcttttgccaatttgtcacctatttttcttagcactcaatatagtagactgctaatcgtggtgggttggctaaaaatgtgaccagtttgtggtgagtttgtggtgggtcttacgcctacagcctgtagtgttgtggttagtgttactacttttttctttaaaaagtaaattataaaaaagaaaataaatataataatataggcttttaaactaaccacactaaccgaaacacgtcacacccctacagccccaacggtttgagctaccacatatactcaccacaaccaaccacaactaaccgcaactaatcacagccattaattccaatcaaaatgaagtggttctttctttaattggatgcctacatagcgagttccatttctttctttggttttaggcaatttcttagccatttctctaccaaatttagtcatagacatcaaatgttcattagattctctagcccaatcacgatatgcattgtataaaggtctacccatgatagtgtaattgctaccagctttacagcattcatcaagaaatgcttcaagtggatccatgctttcacggtattgcttggatgcatcttgaacaacttcagggtctttcaagccttctacttgccacatgattgcgccttgaacgatccaatttaagattccagtccattcagcttttaacttgttttccaaattcttatcaactttgttagctggaatttgtacattgaatggaacaaccttaattcttctccaaataccttcatcagttcctctaatgaatggcaagtggttagtagccatccaaatcttgaatttaggatcatattcaaattcttgaccatataaaaatctagctaggattctatctccaccagttaattgcttaactaacgattcatctaaacgtgaaccttcattagcttcagaactggtaactaaacgtgtattttcaagtcgtgcaatatcactattagcacttccgcttgaattgtggacgatgattgactcaactgacatctgctttgcataactaccaagaatatttctgatagtattgataaatacagatttaccgtttctaccagtaccaagtagcaagaaaaatacttgttcagcagtcgatcctgtaattgagtagccaacagctttttggatataatgaatcaatttctcatcatgattgaaaatttgttctaggaagtctttccacataggacaatcaatattgtctgaatattctgatgcggtttgttcactaaacatctttttaatatcatgatctttcaattcaccgctagttaaatcaacataaccagattcagtgtttagaagcatgttgtcatgatcaaatacaccgtgatcaatagttacgtacttcttaaactcctcaatcatgtgtatttttgccatatgggaacgtgattctttaatgaacttattccattctttcattgctttatctttatcctgctgagtagcaaagctgaaatcaggattttcagttttaatcaaattaacaactttttcagctgctaactcaatatgccgtccattatctaattcccaatatgagccattatagaaataccaagttttatcagctgccatatatctgaatacatcaccgaactgatcatttaatctaagtcctcttcctgtatcatcccatgaacgagcaacagcccgttttttaggtttgttccagttaaagactagatctggctctttcccatcttgctcaggattataaatattaacggcttcactgattgctttatttaaaagggatattccataagtagtagcaccacgtttttcatcatatttatctctcattaaactggaattacgaaaaatcgtatccattttgtggaagtctctaccagtccaaaatgcaaggtcattagcaaatgccatatctgcttcagagtgagaattatagaattgttcccagccgcccttcatgaacatggtaaagcgagtaccagtcttagatttttctgcacgttggatgatgtcaggaatagataaatctagcgctgtaatttcaggttcttcaatcttatccggcactgatttatcagcaccaaataagaaattataaagagcttgcatcttttcttttgaaagagtgacaatcttaggaataccaatactgttcccagttagtgcaaagaaacgcccttgttggtacatctcataattgcctttacgtctgcgattgcctggaatctctcccttaaaaatacagtgaatacctgtaccagattggctgacttccatataagtttcatcagtcattaaacggaatttgtttatcagattgctaacagaactatcaccttgatgccaatctgctaaatcatctgaaatatgatcaatatcaagccctacatatccgttagtaaaatagaatgccaagccatcagcacgttcaatttcatctaatgcttttagtgctgtattaaaatctgaccatgtactaggatcattagatttaccagctctaccgttataaggatcaataggaatcttggtatttttattccgctcctttacccatttaagttgaaacaatccccattgctttaaacttcgcaattcttgagggatgttttcataggtaaattttcccatttacttcactccttagaatagaatatcattttcggataattcatctgttgaacctgtattacctttaaatggatcttctacagtttcttgctttttagcagcttgtggtgggaacttagtcttttgccatgaattagtgaaggtactattttgtttgcgagtttcacctttgtaagtattctcacctactgaaatgtagattctaatgaattttccttcacatgctttcatcaaatcttcttttgacttgatgtatttatcaatttgagcttgagttaaaccaattgcatctgcaatatttgccaaatctgctggatcatatgagcctgaatcttgaccggtttctttatccttagcagtccaaacatttgcaaagaagtggcgaccatgtgtttttgcattagtattagctaatgcagaaactttgtctaagtctttacgaactagaaaatcaaattgcatattttcatgaccgctagggcttgcatcaccatggacgcttacaatttgcatttcataagttccctttggaaatagttcacttctgttgtttgtcttttcgtttaaattaataaaacccataattaaataaatcctttccttttagccatgtgccaagcccaaccattcttataatgttttgcctttgcatacatggttaattctttaaaactggttagttcactaacctttttctttgctattagatcaatatggaatttttctgctttaatagctcttaattcttgatctttcttttgtttaatttttctaatttcaattgaaaaatcatgaccgcagatagggcatttcacacattctgctttaataactgcaaaacaatcaggacatgttttaatctgtaatccttcagtactaccgctatctttgcgtggatgtttctcacgatcttccaaagtccacttgtaatcagtatcaggcaaaccaaacctttcaaagttaccaacttgatcaataatgattgcgtgtttgttaggttgatacctcatggctctcattgattgctgtaaataaactacaaggctctctgttggtctgagtaaaacgacacatgaacagtccggcacattaaagccctcagacacaagatctacgttacagaggatttttatttgtccttgcttaaaactatccatgattttatttctctcgttagagggtgttttagcgtccgcatggagggcattaattccagcgtttctaaattcttgtgccacaatcttgctgaagctcgttgagtgacaataaattattgttttacgatctttagcgaacttaagccaagatttaacaatatctccatgaataatgcttttggtaaagtcgtccatcgacttgctggtataatcgccagtactggattttttaagcaagtttttatcgcctagttgatagccatatacagtaaatggtgctagtttgtgatgttcgatcagccatttagttgttgggccttcaatcattgcggaataaatatctttaaatcctttaccagataaacgccatggtgaaccggtaaaaccaagccttggaacatcagaataataattaaatattttctgatatgttttagctcttgagtgttgtgattcatcaacaatgattaaatctggtttggctaaaatatttaatctatttgctactttacctaccgtgagaatggtgcaatggtttaaatcgacaccctgctgtttaaaagaatctttgatctgctttactagttcttggcgatggacaaagaataatacatggccacctttttttactgttaatttagcaatttcactgattactactgacttacctgatcctggagggctaacaattaaaacgccttgatttccagctgctagagcatttctagccttatcaactaaatcttgctgataatcaaataattgaaacatttaatcatcttgcttattaattttctgcatcatcttgataaaatcactggcatttctggtatgatcattttcttgatcaatctctcgttgaatatctctaacgagaccagataatacaatgccatgaccatgatttatttgaacttggtttccgtcatcacttaaaccaacaataatgaaatgtttgattctgccattaagaatatccatgcacgttgcacttactttgtcttccatttccttatctaacttcaactttttatttacattttcactaaacattattttttctccttaactttatctactgctttgtctaaatctgatttttgaaacttaaataaatcttcgactttgcagcctctacgctggtcaagcctattttttgcatatgtcccttcatcgccatcaagaattacaccgcgagttccatcatcaggtttcttaatcattcgtcctactacatcggataggcccattaaaacattccgaactgaatctcttagttccggcccatattgattgaattgctggccggaagctgtggttattggatgctctgtttcccatgctgtgatatatacgtttagtggcatgtcataaatccattcgataaatctcaagaagtaattagtccattgagaatagtgttgtaattcattgctaattccattttttgattctcggcctttttcttgaaaccaaattttttcgaaattggaaatatcatctaaaactaaattatcgtatttagttggatcgaatgactctaaccatttgtttagatcttcaattggtttcttagcgtcaatttgccatgccccagctaaatgacctgctaaaactttaaaggacttatcaaaacctaatacataagttttacctggaatgaatttagcagtagatgttttgccaattccttgttttccataaataagcacacgccagtttttcaacttatccaatgtttgaatatttatttcaggcattcattgatacctctttttctaacttttgccatttatatccacctgcataatttctttttcctcttaccacagcggagatatttccttgactaattccagtaatttttgaagcttggtttgcacttgaataggctgcaattctgtggctgtctgaagataactgaataataggagtactaacagcttgaataaatttttgagttctatgaccgtaatttaagttgtgagaatgtgaacaccattctaaatttgaaacatgattatcatctcttatttcatttaaatgatttatttcttggtatccatgaggattatttaaaaatgcttgagcaactaatctgtgaactttgaatatttttcctttaccatttttagaaagtctgaccattaaatagcctttttcgttaggtacttgcttcatcatctttccatagatggttatgtgagaattgccatgcttaacttttctagtcagactacgaatccttccaaaatttgaaacttcgtaaagtgattcaaagtgtttaattggcttccaaacttcttctttccaactaaatgctggcattattcttcacctgcatcgcgaatcaaatttttaatgccctgaagctgattaaggacattgctagtaattgctttttcatatgcttggatcattactttcttgaatgcttcccactcatcagtatttttaattgcttgaaaagcttgtcttgcttcggatgaattaaattctgcattttcccatctagcagcaaactttaacttcgcttcttgcttaatgctatcttttaaccaatcttgatcaatcatcgttatctacctctttatctaaaccttcattacggaccttaattactgcttcttcataaattgatcgaaccacatttgctacaacctcacttgggctagcagtaaatttacctggcaaatctggtttatttttattcagccaacgcattgcgccagagtaagttttgccattctttttagattgatagactaaataaattacccaatcgtctgcatcatcttgcatttttttaatccaatcttgaaagtctttaagatccttatcttccatagtcagccatctccattccgtcaaaatagtcttctaggaagctggttaattcttcacgattatcacagttttcaaataagtactgatacatatcctttgcatctgtgaattgacctttaaccatgaatttatcagcgtcatcagctaactgttcttcaataaaatcaagtggtgttctgtactcacaattctgaccaattgcatgaactgtattccctacaactaccgttaagcaatcccaaccagcataaaaatcacgctgtttttcaatcttttggtagttgagttctttagctaattcttttccttgttttgcttccatgatggttttctccctgtttcgtactgactagtaactacatcagtaattgcccaaattcgttgttgtgtttctttgctaagttccatgagttaacctccaataatttgaaatgctgcatcccaaaagccatagcacaaaagagtgaacgttaagatcacgactgctattaagatgccaccaaagatagtttcataatggctttctttatgttggattggtttattaaactcacggtaataattcttatttagcatcccaatcaatttcctttctatgttcattcatccaaatagcagctggatattcaaagattgtcatcttaccgcctctgcctggatgaatattgctacaccaatccggttgaaatggataaagaatatttctttttacccatgcttgtccgtgtggcttagcgtatttcttagcaaattcatcaatactgattgttcttccttgcagttgctcttcagggacatagccacgttctttcataatttgatcaactgctttttgaagttcagtgtcattaatgactagttgcattgtcatcacctggcctatacttctaacaagttcatttgttctgcaacgggatgaatatcatctttagctaatagatcataaatgaatttcttgcctttttgagtccatttaagattgttgtgaactccatgttgaccattatttttttgataatcatatggttcatattgcgtataacctttgtcagcatatttttgatataaaacccaatgtttaccttgtttgaaaataatgtgacgtttattcaactctttatttaaagttttggctgaccaaccataatctttcgcaatttcggtagttgtcataagaccagggtttctcatttgggagtcgaaataatcaacctttggtttctgttttgctaattgctctgcctgatctgctgctaaacgcaaagcttcaggcaatgttttaggaatattgaatttacttggaatttcaatctgttgtttcatttgattaaacaaactcacatattgagcagtaaattgatttccttttttaccagtcatcttatttgctacgaactcgcatccctgtttagtgagcagataattaggtaatacttttccttgcttactggtataagtgcttggaataaagaactgacgtgagctcaaatttgagctctcctctatatctttgatgtaagtacgaatatcacgcattaagttcttgtgttctttaccaatcatttttgcgacatctcggctgtctaaaactgactgaccttcaaaatctaagagtttcataattacttttcctccttatcttctctagctaacttaaatagaaattgtgttgttactcctaagtagtcagcaacatcttgtaatgaatcagctctgggcatacttctatcccatttgctgatcattccgttggacatcttcaagtcatgttcaatctgataaattgacttgtgtttttcctttgcaatgtctttaatcactgaataaagtgacatattagactcctttcttagattttatattgatttataatagaatttattctattatatgagtataagaaataagccaaatcgtaagacctatgcttacaaaaggcggttcaaaagattttttgctatgtttcctttgaacagtttttattataatagcccgttttctaaattgcaagcatttattttagattttgttctatttcttatgtcgtgtcaaaataaaggagtataaaatgagtgcgaaagacaatgtaatgaggctttggaaagaaagaagacctgatataaaatcagtagctgaattagaaagaaaaatggatttaagtaacggaatcatcagcaaatgggaaacgaaaaagccttcaacggctagtgcacaaaaggttgctgatttttttaaagtaccattaagtgaagtcttagatgatgttacagatgaatctgtaacgctgaacaaaaatgatcaagaacttttagcaatgtttagaaaagaaaccgatggaatgtcaaatgaagaaaaacaagattttcaagattctttaggtattttgatgaacactgcaaagcaaattgttaaaagacgtagaaagagtgaaaaataatatgcctggatacgaatatagattaataccagaagattcatatgaaagtagcaatgatattgctaattctatagttgaagatactgctttaaaatacaatgtacctaaatcagaggtaaggtatccaatggttattaactatctttattcgataatcgggacatgcgatatatgtgcttatacacctaatttaattttcccttttgaaaataatggtcaaaatgctttaaatgattttaattatggattaactgctagaaatatttcatttacagcgcaatctattgatgaagtaagtactacttttgcaaatagagtctgcggctttaccctttttcccgctagtggaccaattatgtttttaaatgcaagtattaatacttggggaagaataatatttactattattcatgagctttcacatgcttatcaagcattagacgaccccacatataaaagttctgttgctttaataaatgcgcaaaagagccaaggaaatccttatcctgaagagcttcagcccattgaaacagaagctaatataattgcttcaaatgtttatgttccagaagattcattaaaaaaagaaattatgaataaatcatttaatcaaatgaaagacatttatggaatgagctcagcagcattacataacagacttaaaaactttttgcattatactattggaatgtcaattaatgctgctttggaatatacattagcatttagaaataataacacgataaaaatggatatttgtcgaagctattgtattcaaagtctgcataaccctgttgtgttttaaaacgtccacagtgacgttaaacctgaaagaaataaggagccaaaacaaatgactgataaaaaagaagacaataaagatggttctgttggttgtgcaataggatttattataataattgcggttttagtgggagggttcttatggataagacattctaatgagcaaagcaccgcaaatattgagagacaagaaagaattgaaagtcaaaaggctaaaaaaagcaatgcaattaaaaagcagaaagctaaccaaactaatgctttaattgttaaaaacattaaggctttccgttctaaaaatgatccagatactaattggtcaaaatatgtaagcaaagttactgttaattccaaagctaacttatctgtggaagttaatgatcgttttgttaatttatctgacaaggataagactacttgcatgcgtggtattaacaaagaagctacatgggatgcttatcattatggcttaattagtaagtctaaagttggcaatcgtttatgggcacaaatatttgacgatgacaataatgaaatgggacgttccacatttgatgtttatgataactataagtggaattaatctataaaacaaaaaagcccacctactgctggaacagtaagtgagcgcaactcaataaacttaataatacttataatgtaatagagtaacgataaaccgactggaatcggcttatttcgtctaccctattttagcaaaaataggagtaaaaataaaatggcatcaataagaaaacgtggcaaaacctggtatgtaagattttcaaagagagaaactcaatgggatccagaaaaacaaaagaatgtttctattttaaaacaaaaatcaaaaggcggtttcaaaaccaagtctgaagcacaacagtacggaattaaaatggaagccgcttctattgatggtgtagatgtagttaagaaccctgtgttcgctgactattttgaacactggtatcttacttttaaattcccgattatcagaaaatcaacgcaaaagagatatattaccaattatcattatcttgaaaaatattttggatcaacaaaaataaaagatatttcaagagctaaatatcaaagcttcttaaattggcttggtaaaaaccatgctcctgctacagttcgtaaaaccaatattatggttaaagcttgtgcaggaaatgcaatagaggatggtttaatcgttaagaattttaccaatcgcacaaccatcacaggaaatcaagacaatgtcagagccatagaataccttaatgaaggagaaatgaataagctggtacaattatgcttaacaaatttaactcctcgttatactagcaaatatttagttctagcggggttatttacaggcgcacgacttggagaactaacagctttaaaatggactgatattgattttaagaataaaattattgatattaataaaacctggaatcctaatttaaaaatactaggaccaactaaaaccgaaagttcagttcgaaagattaaagttaattctttcttattagataaattgaaacaattaaaaattaataattctgaatttatttttgctattcctagaactggattaccaccttctagttctgctgtaaatcaattcttaagaaaagccattaaggaaattggacttaacaaacctgattttcacttccatagtttaaggcatacccatgtttcatacttaatttctcaaggaattgatatagctgctatcagtaaacgcttaggacatgctaatatagcaatcactttatcaatctatgctcacttacttgatgaatataaggatcaacaagatgccaaaattattaattcactcaatcaagtttgtgcaacatttgtgcaacaccgtgaaaaattctatgatattgcaaaacattaaatcctataatatcaacgatttaaagcttataaatatttctaaaaacctatattttaattcaaccaaggctttaaagtctggtaaagttactcgtgcctaatagaccaagagcttgttagatcactgatcttgcaagcttatttttttacttattttaatgatttatataaaaaacggtaagaagaccattttattttgtcttcttaccgttttactttacttcataatattgtgatgcttatcgtcatcaggaatttcgtcggccattctttcatcaattggcgtgtatgcatactcagtaatcatttcacccaccttagttggcaagtccaaatcttgataagttacatttctagctaagccattgatagtagctacttccttcttcttctttttatcaaaaatgtgaacgtggttcttgtacatgtagtcttctacattttattttgcacggtcaagtcttgcttcgtagcgaccgttttcgaaaccagcaatatctttttcaaagtcaatatatttcatttgaattcccttgtttcttttctatagttctattttaacctataaatcatgaaaacgattaatatctttagaataaattgctgcaatcataccattttgcaagctaatcctgaattcattactattaggcaaaaattcatttgatgaaaaaacacgaggatagttcccagaatagtgcttcaactcatatcttgcaccaataatattaaaatcttcgattgcttttaaagctgcaaaaccaatataagaataattttttcttttttgaacaacatgcgtgcctgcattaaaaaagcaaattagattttgttggtcaatcaacgttacttttttcgcatataatctcatttcaggatttagcaacattaatagattgatcaaaaaatgatccaatcttccacctgtagcaccaaaaatcactaattcatccacatgataatcttcaaaagcaatctgcaacattagctcagaatcagtccaatccttgacaggattagaataacgaatgtcttgaacattactttctatttggcttaagtcattttcgtgtaaagaatcaaagtcacctactgccacatcaggtattattcccagttcttctaaaaacaaggcaccacgatcaaccccaataactaaatcagcttgagccagcttttcttcaatatcttcaggccacaattcagttggaccgcccaacaatgcatatgctttcattacttaataatcttttctaatttatgtacttgactgccaacatcaccattttcatacaagtatgaaccaacaacaaatatattagcgccagcattttcagctaatttaatagtctgatcattaataccgccgtcgacctcaatatcaaaatcagagccgacaatctctctaactgacttaattcgattaactgattcaggaagaaaactctgtccaccaaatcccggcttgaccgtcattactaatacttgtttcagtaatggcaaatacggttcaaccacttcaactggtgtatctggactaattgccaaagcagcatcaacgccattagaagctaaataatcgaaccaataatataacttaggcttgtccattgcttcatagtgtagttcgaccaaatctgctcctgcactaacaaaagctggtaccaacttatctggggcatcactcattaagtgaatttcagcatctgtcatcggaaattcacgcttgaaatctttgattagttgcggtccaaaagataaattaggcacaaaatgtccatccataatatcaatatgaaaacggctaattccggcctggactgcattttcaatatcatttttaagatcaatattatttgcgttcaaaattgagggtgcaatcatcatcagctattacctctattttaaatattccggtatgcgaccttcgctaatctcagtccgcatagccaaataatcctcatatctactttccagaatttctctggcttcaagtaacttctttacttcacagcctggctcctgcaaatgctgacatccgcggaacttacagtgaatacttgcctttttaaactcaacaaagtaattacataactcattcaacttgattggtgtcaaatcaattgacgaaaaacctggcgtatctgctaaaaagcccgcgcctaacttaaaaagttcgacctttctagtagtatgtttcccacgattcaagctagttgatatcgcaccagtcgcttgattagcatctttttttaaatggttaagcaaagttgacttaccagcacctgactgtcctgctaaagtccaaatttgatttttttcgatcattttaggaatctgaatttgcatttcatgataatcagtgaaaacaagataacctattttttgataatatgctaaagcttgcttgattgtgtttaactttgcttctgatagcaaatctgctttagacaagtaaattgttacaccaactttttgccaagaaaagaaagtcaaaaaacgatctaacagctctacagaaaaatccggttctactgcagaaattactaacaaaacatgacttacattagcaactgctggtcgcccaattcgattaatccgcggcaagattttcaccagatagctcattcctttatcatctatctgaatttccacatgatcgccaactgccggtttttgctttttttgacgaaaaacgccgcgagcacgcgttctcacgatacccgcagcggtttctacatcataataaccagcaatcaaaccaacgacggttccttgcgctagtttcatttatttagtcaccttttcattcaaaactgtatcgccattgcgaacaacctttaattgtccactaccttctctaatgttaaatggaatcgagaaactcatatcatgcttaatatacaagtcacgataaatattgttcaaggaatgatcatcatccttaatatagatctggacatgatcacccttgccattaacggattctgactcagagttattgcttcctttatcattatcaggcttctcactcttagaaagatcatcaccaacatagttaacggtaaaggtcttagttacagtagtttccttgtcttcctttggacctttcgagatcttgatggtaacagttgaaccacgctcaaccttagtacccggacctggctccatcgaaattactaagcccttctcaacatcatcagaatattcttgattgatttgtaaagtcaggccatgttctttggcatagtcttgagcactcttcaaagaataattacttaagtctttcaaggtaaccatatttgaatgtgatctagcctgcttgccacgtgaaactatcaacgtaattgtagtctgcgtcggcttaacctctacacctgcagcaatgctttgagaaataacttgattttcgtcaactttattagaatattggtcctctctaactacattaaagcccatattttctaatttttctgccgcttcggcatagttcttcccaaccatatcaggaactttaaccatgctagaaccgctggaaacaattaaatcaacgctctttccccgctctagactattgcctgcagttggttttgtcgcaataacccggcctttttttatatcatctgattgtcgcctaataatttttccaacctgtaagcctgctgcttcaagtttactctcagctgctttttctgcaatattagttacatcaggaatattaacatcctgtcgtttatttccagtaccacttaaagcgaaaatcatcataaaaatgattaaacccgcggcaataattgagatcagccaccaccatttgtgacttttgacattctgtaaaaaagtctttttctttactagcttgcttgattctactgattcggtttttgctggctccaccacttctttttcttccttttgtggcttaaatccaggcaatacaattgttttatcatcgttattaccatgatatggtacaaaaaccggttcatctgcccgttcaggatccaagctactatccaaatctgctttcatttcctgagctgtagcatatctatctcgtggatctttcgcggttgcctttaaaacaacattttccagcgcctgtggtacacttgaatctttcttgcgaattgaaggaattggttcttgcgcatgcttcagtgcaattgccactggtgtatcaccgttaaacggaacagttcctgtgatcaattcatataaaattattcccaaggaatagatgtcagattgtttagtaaccattccgccacgcgtttgctcaggagacatataatgaactgaacccattactgaattagtttgtgtaatcgagctttgattcaaagcaacggcaattccgaaatcagctattttaatattgccgcgcttatccatcaaaatattctgtggttttagatcacgatgaataacattgtgcttatgagctaatgcaactgcactcaatatctgatccataattcgaataatttcatttaaatccaaaggtgaatttttttgaatatattcttttagattaggaccatcaacatactccattaccatgtatggcaaaccatgatcggtacctacatcaagtacagaaacaatattaggatgacttaattcacttgtagctaatgcctctctttgaaaacgagcttgggtttgcggttcattctgcaaatcaaggcgtaaaattttaactgccaccttacgttgcaggataatatcttccgctagatagacattggccattccgccttcacctaaggtatcgatgatgcggtaacgttccccaagcagataacctttatcgatcactgctctcgtcctccttgttccaaattaagcagacagtaatattatcaccaccacctaatcgattggcctcactaatcaatttattacaacgttctcttaagctaagctccttagttgccaaaatttgttggatttgtggatcgctaagtgaattggttaggccatcagtacagagcaaaataatgtcgttttcccccatcttgatctcatcaaattcaggatcaatcgtacttgagacgcctaatgcttgcgtaataatatttttctggggatggtgtttagcttgttctttagtaatctgacccatcttaactaattcgttaaccaaagaatgatcttcagttaattggacaaatttaccttcagaataactataagcccgagaatcacctaaatgagcaattaaggcatttttatcaaatgcaaacgccaatacaatcgttgtccccattccatttaagtcaggaaacttatcagcagtctttaaaattgtttcattttcagaatttaattgcacatcaagccatttatgagcgagattagcatctgcaaagtcagtcatactaaaattatgtcctaaatgggtgactgccattgttgaagcaacgtcaccaccttgatggccgcccataccatcacagacaattgctaagacaattcccttttgatttttaaaaacttttacaaaatcttgattgcttttccgtaccttaccaatactcgaagcgtatgctgtttcaatcaaaaatctaacctcgtaacttaaatttagcaatgaaaaatccatcattgccatctagatcaggcattattttcaacatccctgtctttgattcaagtttagttaacttaaatggaactagttcaaagtcaggatgtgcttgcaaaaacttcttaactacctcttcattttcttccattgaaattgagcaagttgaataaaccaactcgccattcttttttaagagtgaacttactgcagttaagattgccaattgaattttttgtaaattttgtaagtcctgttgtctcttagtatagcgaatttcaggcttacgacgcaataatccaagcccagaacaaggggcatcgactaaaatttttgtaaattcacctgccgcaaaaatctctgtagccttacgtgcatcacatgccttagtctttaccttatttgcaacgtgcattctctgggcattatctcgtactaaacgtaattttttatcatgaatatctaaggcagtcacatcaccattaacaatgctttcggcaatttgcacggttttcccaccgggagcagaacaagcatcaagcacatgctcatcttgttcaaagtcaaaagcttctacgactaaactggcagcttcatcttgaattgttaacttgccttcttcaaacaaatcactttcgctaatgccaccgtgactcaaaatcacatcatcgcttgataacttagaccattgtggttgatagttatcccgctctaactgggcaaaaacttgctctttatctgccaactttgaaatacgtacactgtttttagctggctcattaatactgtttaaaactgattttgccttgtctaggccccagttatcaattaaatattgaactaaccattcaggtacgctctctttgacacttaaatatttaactggattattttcagctggtaaaatcaccccgcgcctagtaaacgaacgcaaaatcccatttaccaaccgaaagccagctgaatgtcgcttgccatattgcttagcaagtttattagcctcatcaagtacagcacgatcaggcactttatccaaaaaaatcaactggtaaagtgacattaacaataatggcttaatatatttttcggtcagttttgtcctaactaagccttttaactgatattctaaaaacaatcgatactgaatcgtgccataaacaatattagtagctaaattttggtctgcaattgacaagttagagtgctttaagctgttattcaaactaatattagaataggagccttgatctaagaccttgatcaatgtctctaagctgactgcacgtgcactcttatcgatcgacaatttcttcacctgggacaaacttactaccttgaccatttaaaaagctcttgatgtccattctctttttgccacttggttgaacttcaagtaagttaagtactgaattatcagcaaaactaatggcaaaacgtcctttgttagcaacaacagagccggcatttaaacttgatgaatcagatgcaatttctgccttccagatcttgaaacgtttgccttcaatcatcaaataagcaccaggatctggattcaaagcacgaatcatatcgttggcctcttctgctgtcatatcaacattaagcttttcttgttctttagtgatgttaggtgaaaagacgaccttttctggatcctgtggaacctttttaattgagccatcaataattgctggtaaagtcttaagcaataagtcccgcccaacaattgataatttactaaataaagtgccagcgttatcatcaggctcaatcttaattgcttcttgagcataaatatcaccagcatccatcttcttaaccatttccataatggtaattccagtttctttatcaccgttaattagtgaatattgaattggtgcaccgccacggtatttaggcaaaagtgagccgtgaacattaactgccgcaattttaaccgaattcaaaaacttagttggtaaaaattgcccatatgctgcagttacaatcaaatctgcatgcatatcaattaatttctgcatttcgtctgatccagacaacttaaccggttgaaagattggcaaatcatgcttttctgctgcgatcttggctggtgacttagtaattttctgcttacgtcctacctttttatcaggttgagtgaccacggctttaatctcatagccttcatcaattaacccttcaagtactggaactgaaaatttcggtgttcccataaatattattgatgtcattaaagcatccccttacataattctctctggttcattatcaataaaaatacttaaaccatatttcttagcttcctgcgcggaatcttgaacatggtgtaataattcatttaaatttggttcttttttatattttaccagtatttgataataatatttattttttacacgagaaattgcacttggcgttggtcccaaaataatcgttggctcatgcaagtgctcattcaaatacctcttaatcctaaaagcctcacgagctgcattctgttcttttttagcagcaatggaaatcagcacggtataaaaatatggtggatagttaccagcatgccgcatattcatctcatagccataaaatcgttcgtagtcctgagtttgagctagttgaatagcataatgctctggattataagtttgaattaagacttccccttccttatcagcacgacctgcacggccagctacttgagttaataattcaaaagtcttttcagaagcattatagtcagaaagccataatcctgtatcggcattgattactccaactaaagttacattagggaaatctaatcctttagcaatcatttgcgtacctaacaaaatatcagcttcatgagcaccaaaggcatctagaattttcttatagctaccctttcttctagttgtatcaacgtccatccgcaagattcgtgcaccaggcagaagctcttctaattcttcttgtaccttctgtgtacctgcacctaaaaaacgaatttgcgagctttggcaattaggacaacgtgtgggtactggctcagtatgaccacaatagtgacattgcatactgttagtatccttatgcaaatttaaagaaacatcacaattaggacattttaatacaaaaccacattcacggcaaagcataaaattagcaaaaccacgtcgattgagcattaaaataacctgctctttttttgccaaacgcttttttattgcatctactagctcaacagataaatcaaattgaccaccagcaaactgcacgtgctttagatcaatcaaattaactttaggcaatttcttttgattagccctttcagttaaccgtaaaagatgatagacatttttttgggcgcgtgcacggctactcaacgatggtgttgcacttcctaaaaccaacggacaattatgaaatttactacgccaaatagccacatcacgtgcattataacgtggatcggtttcttgcttatatgaagactcatgttcctcatcgatcacgattaaaccaatattatctagtggagcaaaaactgcactccgagcgccaacgaccaccttagtctcgccacgacgaattcggcgccactcatcatatttttctccctcagatagggcactatgtaaaacggctacctcttgaccaaaacgtgccttaacctgacgaaccatttgcggcgtcaaggaaatttctggcaccagcattaatgcatttcgcccctgtttaagagccttgctaatagcgtgtaaatacacttcagtcttcccgctaccagtaatcccttccaacaaaaaagtctcagcctggcgctgttcaattgcttgggtgatctggttcaaagcaccttgctgctcaccatttaaggtaaccgctgttttatgttctccgtcatcaaatccggataacggatcgcgataaacctcaacactttttttattcaaccaacctttggtaatcgcagaattcaaactcgccgccgtcaatccaagctgtttttctagctggctttggcttttgggataatccgctgcattatcaatgatatccatcaataactttttttgctttaccgcattttgacgtaaagtattgtaaattttgggatattcctctttttttaatgctagttcatattgattttcttttttcttcttggctcgattttctaccacatactcaatctttgcttgatcatcttgcaataatttgcggaattgcttaatctccgccagatccgtaattttatttaaatcaattggatcaccctgaaacagcggcattttggcagctctatcattagctggcactagcaatttgcgataatttgctcgcattacccaaggtagcatcgcttgtaaaattttaattcggtaagaaaaaatattttttgctaaatcagcagataactttaccaactctggcgtaagcggtggcatctcatctaccacaactagcaaatccttaagtttacctttaaattcactttgatcagtgatccccaccacaaaaccttgcactttacgaggaccaaacggaacaactactcttgatccaatcgcaatatccttttctaattctgttggaatatgatattcaaaaatacggtctgtttgccgtgcagctacatcaacaataacctgagcaatcatttaatcacctgtaaaaaagaccttcaccccaaaggatgaaggtcaataaattaatcttcgaggttaacctcggcatgagctgggtcaacagtaactttaccagcagcaatttcttcaagtgccttaccaacagccttatcacacttaaaatgttccaaagttggtggatcaccagcttcaagttcatgtgctctcttagcggcaagaacagataatgaatagcgtgaatcaacacgtgacaataatttatcaattgatgggtaagtaattctcataataattaatcctccttgaccatcttacgatagtcatcaattacacgtttaacactgacatgttctgcatcgacgatcgctttaatatgatcaactgcattagctactgtatcattaactactgcataatcatagtcttccatctccaaaatttcattgcgcgcttgcttaattcgaccacgaattacatcttctgactcggtgccacggtgttccaaacgcaaatgtaacgtatgtagatctggtggggttaaaaagataaacacgccatcgggcatcttttcacgtactttttgtgccccattaacatcaatctcaagtaaaacatctttgccatcatgaagcatcttcttcactggtgcaagaggtgtaccataatagtgaccgacatatttattatattctaacaactcaccatttttaatagcctcttgaaagcgatcttcactaacaaaaaaataatcttggccattaacctcacctggtcgcggttgacgcgtagtcattgaaactgaatattcaaatggaaagactttgttttcaacaatcgcgcttttaacagttcctttaccaacgccggaaggaccagaaagcacaagtaataaacctttatctgccatgctgaactcctcttaacttgtaatatatctagtttgcactaaaattgtttctttttcaagttttctctttgcatacaaaaaaacagacaaaatcgtctgctcctttactaaattattttctcgaatgtctcacacactacttcagtttcatctgtgaactctcgtcccagttcttgacattcgcgcgcaaaaaatttctcgtgtactttacgccaagattcatatgagcgatcgccctcgccttctaaataggcatgctcagctgagacatttttaaatggcataatctcaacagtcttattttgaatcacacaaactggttcatttcgtccatttaaaacaattgcgtacatccctacaaccggtacatcttcttgcgcagaatacaggctagtcgttgccgtcttaattccacttttgaccaaatcactaagaatatctgcatcccggctattagctccaaaagcaaaagcaccttctaatgctgtaggacttacttgatgttctacacaaaaatcacgccaaaatttactaatactagtcatctttaatactcttaatcaaatctgcagcattcttctttgctgcatcggttacatcttgtccagccatcatctgtgcaatcgctgtaatggtttcttccttgctaagtgggcctatttgagtaaaggttgaaccatcttttacttgcttagctaccaagtagcgttgatcacccgcggcagccacttgtggtgagtgcgtaattgcaattacctgcttgttgcgaccgattgagtgcatctttttcccgatagcagccgatactcggccagaaactcccgtatcaatttcgtcaaaaatcatggtacccactggttcaactcggctgaagattgccttcaaagctaagatcaatcttgattgttcaccaccagaaacaattttaactaatggcattaaatcttcacctggattaggtgcaattaagaaaacaatcgcatcagttcccttatcggtaaatgtctttgtttcatcaaaattaatagaaaagcgagctttttccatgtagagatcagctaactcttgcttaatctgctcttccagagaatgagccactttttcgcgtattaaatgcagatctctagcttcttgggtcattctttcttcaatcttggcaacttctgcttgcaatttttcctcatcaaggccgcctgtttcaaattgactgagttctttttgtactttttgataaaaagcaaacacatcagccaaggttgggccatacttctttttcaatgaattcaaggtatccaagcggttagtcacgtattgaaaacgttcctcatcgaagtccattgcatccattaagttcgataattcactgcgggcgtcatttaaagcataaactccatcatcaactgtcttagcaaaatccttaaattttgaaccaaattcagttaaatcagtcgcagcattttgcgcatctccaagtaaagttgcaattccatgctcatcgtcatcatacaattgcatgaagtaattcgccgtatccgcaattttttgataattatttagttcgttatattcttcctcaagtttctcatcttcttgtggatcctcaaggtcggctgcttccaattcattattctgaaactgcagaatatcttgcttctgagctaattcttgggcatcttgacgcaggtgcagcaattgactggttagcttttgccattgagcataatcagtttgataagtggctaaatctgccttaaaagaagcaggggcataattatcaactaggtcaatctgccggtcctgatccatcaaaatttgctgatcatgctggccgtgaatatcaaccaaatagctaccaatctcgcgcaaaacattaatcgtcgtcaattgcccgttaatccggactacatttctgcccttgacagctaattcacgactaatcaccagctgatcgtcatcgtgcggcaaaccatattgatcacacaattccgcgatcttttctttttgatcatccaattcaaacaagccagtaataatcgccttggactcacccgaacgaatcatttctttttgaccgcgaccacccatcagtaatgaaacagcatcaataataattgacttaccagcaccagtttcaccgatgattaccgtcattttttcttgaaaacgaacctttaagcttttaataattgcaaagtttttgatatctagctcaactagcatagcttcactcctatagaccacttacggcgcgctcaaccacttcagctgggctcccttgccataagttgcggccaccatttgcttcgtctttttgtaaatgaatcaagaattcaatattgcctttgccacctttaattggtgaataatcaacgcctaaaacattgaagccgatctccaatgccttttgcatggtgtgctcgattaccgccttgtgcacttcatgatcatgaacaataccgtgtttaccgacattctcagggccagcttcaaattgtggtttaatcaaacaaacggcatcacattgattcttcaaaattgcatacatcggtgccatgatcaaatctaacgagataaaggacacatcggtcattgcaaaatctggcagtccttgatcaaaatcttccggcttcgaatagcggaaattctgcttttccatcaccactacacgcgggtcgtcccgcaattgccaagctaactggttgtagccaacatccaaggcatagaccatctgagcaccgttttgtaaagcaacatcagtaaaaccgccagttgatgcaccaatatctaaacaaattttatttgttaaatcaatgtcaaagaccttaagagctttttccagtttaaagccgccacgcgaaacatatttcttaccatcatctttcacgtaaaacttttccccttcaggaaacttagtcccgctcttatcaattcgttgatgattgtgatcagaaaccagccccgccataatcgctctttgggcagctgaacgagaatgaaaaattccttgttctgctaataaaatatctgctctttgttttgccatttataacaccttttgataaagatctaaaaagccagttagcacttcgccatttagtccatgcaaatcatcttgtgcttgcttaattaagtcagttagttctttgcgactttgatcaattcctaacaaagttaaagtattattctttccttcagcttcatccttgtgcgtagctttaccagcttctgcactagtttcaacgacatcaaccaagtcgtcatagatttggtatgaacgaccaaaaattttggcaaaatcgactaattttacctgttcaatatcactagctcctgcataaactgcagccatctcaacgctagcctgaattaagcaaccggtcttcagccattccatcttattgataaacttggcatcacccgcaacactagcattgttagttgaatcaatatccaaatattgaccgccaaccatcccattagggccaactgctttggtaattaaatctaccaatttcgccgacttactgccttccgcaatccattgaattcccatcggcaagagcgcatccccagctaaaattgcctcagcctcgccccattttttgtggctagtcagcttaccgcgccgatagtcatcgttatccatggcaggcaggtcatcatgaatcaaggaataagtgtgaatcagttcaatcccgcaggcaatcctaatttcaggttcttcaatctttctgcctaaagcatttaacgtagctaaaaacaataacggacgcaagcgcttgccgccacccatcactgagtaggccataatctgactgatcttttgatcttcaacctcactagccaaatgcttagccagataatcatcaattactggggtccattcatctttaaaataagtaaatgctgtcatatttattcctctggtgctgatgcgttatttggatctaatttgtgttctgtgccatcactatcaatcaacttagccacagtttcttcagcactgttaagcttcttttctaaatcacggctaatctttacgccctcctgaaattcttttagggcatcttccaacggaacatttccgttttccaaattttgcacgatttgttccaaattagttaattgttcttcaaaattatttttcttcactgccattttgttcttcctttacctttgtaaccactgcttcaacttgtccatctttaaaatgcaatcgcaaatgatcatccttttgaacttgtttcacagaactaatggttttcccttgttcatcagttgaataaacaaaacctcgctctagcgtcttcaaagggctatagtcatccaactgctgcattacttgggtaaaactattgcgtttatttttcaaatagtgctgcatattatcaatcagtcgttgctgtaaaaaatgctcttgttgctgcatctggccgattctcttatctggactaacgctaaacaaacgctgcttcaacagttgataaccttggacagaatgggtcaaccgattttgcatactattttgcagcctttgttttaattgatcaacttgttgaatctgctgatcatacagtctagtcggctcgcgcaggatgacagaattctgcacccgacttaagcgctcacgtttcgaacgaataatattttgcatgctagctaccaactggctggttaattgcttaatatgcgcaatttcgtccaatgtattaggcgtagcatattctgctgcagcagttggtgttgctgcacgcgcatcggccaccaaatcacacaaggtagtatccgtttcatgaccaactgaagaaattactggcatctgcattgcgtaaacttgccgcacaacctcttcttcattgaatggccacaaatcttctagtgagccaccaccacgaccgatgatcatgacatcatacttgtcgccttgagcggcaatctggcgcattgctctcactaatgaatccgctgcagtatcaccctggacttgcgcaggatacaaatcaatctcagcatgcgggaaacgccgattagctgtaaccataatatcgtgaataactgccccagaagcactagtaactactgcaattcgatcaggaaaatgaggcaacttcttcttatgctctggatcaaacagaccttctttggctaatttggcctgcaactgcttcaattgctcatataaggcacctaatcctgccggttccatttgttcagcataaaactgatacgagccctgtgggccatacacgctgacatacccaaccacataaaccttcattccttcttctggtttaaatttcaccttatcaaagaaggaacggaacatcaccacattaattttagatttttcatcttttagtgaaaaatactggtgcgaattacgccgataacggaagttggacaattcaccttgtaagaagaccttatgcaggtaaggatcattcttaaatttttgcgtaatataataatttaaatcagtaaccgttaaatatttattctcggccattttgtctcctagtcaatttaacaactgcttccattaagaattgtactgtaagaggacctacaccgccaggaaccggagtaatatagctggctttttctttaacattatcaaagtcaacgtctccgactaatttgccattaacatgattcatgcccacatcaacgaccactgccccatctttaaccatatctgcagttaccaaaaatgcttgtcctgttgctgaaactactatatcggcttgtcgtgtaatttcagccagatttttagtatacaaatggcaaacagtaacagtagcattttcctctaacattaatgccgctactggtttgcctacgatattgcttcgaccaataactacaactctcttaccagccagcgtaatttgataatgtttcaataaagcaataatgccttctgcagtagccggttcaacaaagtgattttccatccaaagttgaccaatattcgcaggcgttaaggcgtcgacatccttattagggtcaatcctttttaacaaggcatctgcatcaatctgttcaggtgctggcaactgtaccatcaagccgttaatctcaggatcagcatttagcttatcaattaatgctaaaacttcttcctgtttagtatcagcgggcatttgataaatatcttggataattcccatcttttcagcccgccgcttttttgttcgaacataaatcttgctagcaggatcatccccaatatttattacgcaaaaatgtggcgttattccctcttcttttaatttcttaactttttctttaagattttgccctaattcatttgcaaatgctttaccatcaagaatctttcccataaagcccgttctccttttgtaaaaaaataactggcaaaactgccggctattcatcgctatttaacaaagtttgctaacattccattaataaatggcttttctttaggctcagcaaattcgtcacataaatttaaagcttcgttaactgctgccttagcatcaatttcatcgctatgcttgatttcaaataaagcaacttccatgatggctaccacagtttgactcacacgttcaagacgccagccctttttcaaatgactagttagttcagactgtaaatttttgcgatcttctagtacgccttcgattaacttcttagaataggcagaaagctgttttaaattaagcgttgcaacgacttttgcttcaacttcttcggcagttaaatctggctcctgattagccaaataaacggcttgcatagcaacttttcgactttcgtgttggttcattatttttcttcttcgtcctccggaaacagctctgatgtagtctggtcagtattttcatcttctgggaaaactaaaccgacaacatgaacgttgattgccttcagctcaagatcagtcatttgcaataattgtgccttcaacttcttttgcaacgtcattgcaaccttaggaacgttaacgccgctttcaagataaacataaatatcagcaattagcttattatcgtcatcaacactaatatttacgcccttaccatgatcttcacgaccgaaaacccagtttaagcctgatttcaaactgccgcgcattccggcaacaccatcaactttttctgcagcaatacccaaaataacttctagaacacttggatcaattttaatttgctcgctgttttcttcaccacttaaaagaatttttgaactatctgccattttgttacctcaaataaactacttatttgcacgtgatacgtaagtaccatcagcagtgttaatagttaaaacgtcaccttcgttaatgaagaatggtacgttaactactaaaccagtttccatagtagctggcttaccaccacctgatgaagtatcacccttgatgttaggttcagtcttagcaaccttcaaatcaaccgtattaggcaattggatacctaaagtttcaccttcgtgcataactacgttaacaatcatgttttccaataagtaattagcttcatcgccaatttgttcatttggaattgctaattgatcgtaagtagaagtatccatgaatacataacttgagccatcattgtacaagtattgcattgacttagtttgaatgtctgcagtttcaaccttagcagttgaacggaaagtatattcttgtacagcaccagttctcaaactcttaagctttgaacgtacaaaggcactacccttacctggttttacgtgttggaattcaacaatgcgccataaatcgttgttgtattgaatagtcaagccattcttgaattcgtttactgaaatcattgtcatattaagtccctcatttctacaattattatcttaccaatcttgaagcgtttttaccataaatacgataaattaaatagctattatagggaaatcaattcatcctttggcaaagtggataaagtttcaggcgtttgatcatggaccaaaatatcgtcttcgattctaacaccgcccttgtctggcaagtagattcctggttctacggtatgaaccatattattgaccaatttagtagttctaaaaggtaaagctggttgacacaattcgtgaatttcaagaccaatgccgtgaccgatcccgtgtccaaaatactgaccgtaaccttgttctgtaatataatcacgtgctgctttatcaacatcatatccagtattacctgcaactgccgcggcaatgccacggcgttgtgcttcatgtacaatatcatagattttatgcatttcagcatcaacttcacctaatgaaacagttctagtaatatctgccgcataaccgtgataaaaactaccaaagtcaatgacaatcatatcgccttcggacaattctttgtcactagcaacgccatgagcccaagccgaacgcacaccggaagctacaattgtatcgaaatcagggccatcgccgccattaactttaaataggtagtccaatttagcaccaattgcacgttctttaacgccaggcttaatcatcggcaaaatacctttaaagctttccattgaaatatcaattgctttgcgcaatgccgcaatttcaagatcatctttaatattacgtactcgttcaaccaattcttcaaccatcacaaattcaagttctggatttagttgcttaagtttttcatattcactcgctgaaacgaattcaccttcaactaagaccctcttgacgtccatttttttcaaggccttagtaagttcttcataatcactagaatgtttcattacaacatccatttcgccaggtgcttgtgctttaatctgtccagcaaaacgagaatctgataaaagtactcgttcgccactagcagtcaaaattaattgtgcttcttcccctgtaaaattggttagatatcgataattagcttgattaaaaataatcaatgcatctgcatttgcttctttaattaaatcagttacatgctcaattcgctggttaattaaggataataattcttgcctattttccatctcagagaccctctttttgtatgatattggtttaattatacatgtttctgggcggaaaaagccataaaaaaagacgggtggcttatgctactcgccttttcatgttaatctctgaattacttagcttcttcagctgggtatacagaaacttgcttcttgtacttgccaagacgttcaaatttaacaacgccgttaacaagtgcaaataaagtgtcgtctccaccttgacctacgttcttgcctgggtgaaccttagtaccacgttgacggtaaataatagtacctgcgtgaatagtttgaccgtcaccagccttggcgcctaaacgacgaccagctgagttacgaccgttggcagtagaaccaccacccttgtggtgagcgtataatttcatacctaaaatgttcatattcatttcacctctgaattaagcttcaatcttttcaactgtaaccttagtgtaaggttgacggtgaccatacttgctgtgtgagtgcttcttaggcttgtacttgaaagttacaactttcttttccttgccttgcttttcaactttagcagttaccttagcaccatctactaatggagtaccaaccttaacgtcgtcgccattagcaacaaggataacttcgtcaaaagttactgagctaccttcttcagcatcaagcttttctacaaatacgctatcgccttctgcaactttgtattgcttaccaccggtcttaataattgcgtacatttgtacacctccgaaaaaaatacttagactcgccgaactggggtgcttcttacataagaagacttctaacctcaagccgtgcggttgcagatgtggaggtctccacaaatacaactcttatatcatacaacgcttttagactaagatcaattatttttttacattcgccattgaccgccatgcacttttgcaacattttcggtaatgataaacgcatcctgatcgatctcatgtactttagaaataagtggcccatattcacgtggatcaactacgattaataattgacgcttgctttcgtcgctatatccacctataacatcataaatcgtcaggccttgataatcttctttaagcatatcttgaattcggtctaaatctgaattactcataattctgacttgatactttttatcaaaaccggtctccgcgtagcgcatcgtaatggcagttaccacttgagaaaatgctgctaagaagaaagcattccaaccatcgacaaaaatgttcaagaaaataattaccatatcaatgcataaaagcgtagttgcaggatttaaataaaaatatttcttcagaatcatcggcggaattgttgtcccaccacttgaggcattaacgcgataaagtagcgaaactccaagtcccattaatgcaccaccataaattacggctagtaggtcattattcactgctttaaagctaggcgtaacttccatcaaaactggtaagagcaaactacctaatgcaatattttgggtagtctttttgcctaaaaagattgccgccaaaatcagcatcaagccattcactacaaatactgtaattgatcgattaatcccccagaccgcatcgactagaatagaaatacccgttgagccaccagctgcaatattaatcggtccataaaaaagattgattgatattgcgattatttcaagtcctgctaaaaataccaaccatctcatccaggaacgttgtttaatgtttttcattattaagcgtcctttcttttagttagtactattttaacgaaaaatcatctgttagctcaagcaaacaaaataatgttaacaaattatttatttttaacttctttataatcgattgattgcgttccttcataagcaggtaaaccattttcagctcgatataatgctcgctcaaaagagcggtagcctttagatgaagaaacggcaaatttaacaccatactttgaagcgaattcctgaatattccaagtagcatcatgagcagcataagctgtcatcaagattacaatatctaagtctttgatttgccgttccattaccttcttcttgccttcaaaagcatctattggaattgggatcccattatagcgcgaaacaatcccttctaatattccttcattttgattatcaccaatcgcaattcccacccgctgatagtgcaaattcatgtcgagtttagttaactcttctgtttcttctttctttgacttatttttcttttgatacgacagatctgatttcttaggcggatcaacttgataaatccaacgaatctgtactgcctcagcaggatttttcttaatgcgaacatcacccgtataccaagctagatctacaattgaaccatcttcaacatgaatattttcaccttgataataacttgaatcaaccggaatcgtgatatccttaccgcgaattctcaacttttcgcccttaatatttctagtgatagctaattgattggccttgccgcggaccacagcataccggaattcttcgattgggtcataatcacgcatgcgcaatttgcgataacccaccacgcgcaagacttctgcttcataatttggattatctcgattttcaatagcttcaactatgtcaccgctctttaaattcaaagagtgaatttgtgattctttaatacggtaaacaatttgaccactatcattaatcaaattacagcctgataaagcccgaataacagtatagcggcgtcctttacgataatcgcgcttaggttgctctttgggcttcattgcttcttcaaaaattttcttgttaacagcttctttagttgtcttagatttttgaattgcctgatccaatttacccaaaacattgccatagcgcttgccaacgcctggaacaaacgtcaacttgtgtaaagcatcaagtgaactctttttagctttttcatcacctggagtctcaattaaggctgtcagcccaatcaataattgcttaatttgctttaaatctgcatttctttgtgcaattgattgtgtatttgcaattttattcttaggttgagttactgatttagtctcagatttttcagctgtattatcttcggccatatttaggatagctttaatcgcacttaaactattttcgagacttttatcatcagcctcagttttatttaaaattattttgatattatttcgataatcatacattattctcaccacttttattgtataacttactaatagtaacgaacataattatactgatttttatgaagtagtgttaattgattgatcgttttagtgattaaatttttttacgcaaaaagcagacaatctttatattgcctgcttcctaatttttctatttatcgagttctaagccaattgaaccaattagcgaaattttcacctgctgtaacacgatgaaccaatacaatacctactgcttttaccggctgactttgcgcagcagcaattggaaatgcagtagagagagcaacagtcagtgcagttgcagaaattgcaattttcttttttaaattcatttcaaatcctcctcgtaaatatctagacatcaacatcattatattacgtgggattctaaataaataattcatttatgcacacatagctttaaggctctaatacaagtttatatatttaactatataaaaaggcgactcacaatcgagtcgccttttactacaatttctaattattaagctctccactcgccgccttggccataagtatgcttacctaattcgttgataattacatgaatgtgttccttaggcgcaccagtattcttgtgcactgcttcagtaacatccttcattaagttagtaatctgctcatctgagcgacctttaattaattcaatatgtacaaatggcataatttagccctccttttttagtttaattatagtataaaaatttctcactaaaaagcaccaccgccgctgccaccaccaaagccgccagacgatccacctgaaaatccacctgagcttccggaaactgaagataaaccagtagacacgcctgaagagaagctacgttcaaaactatgctcaaaactgtcactactgctactatagaatccactataaaacagaactggtgcagcatctaattcatctgcaaattcaatcttaagctgcttcaatacctttttggatagaccaaacgctacagcatacggcataatgtcttcccataaaatcagatcaccgacgtctttcatcttgaattgaccaatatcgtctagcattttcttaaagcagcgaacttgatctgtctcaagtgcacctttttgggtataaatacttaaacgagaattgcccactatgaatgcagcaacttctaagacgatcatcatgattccaattattatcacaaaactgggtatattatttgccatcattaagctaattacccagatcgcaaagctagcaatcattcccatgagcatccccgttcggaagttgctacgctgctttttatattttttatcaagcaagtccttatcctcaacttgcttatattgcccgtcacaccatttatcaaaacgcctacccaattttttagaagtataatcccgcaaatctttcgttgtaaatgacttaccatcaccaactttgttaaaaataaaatctaataggtcatcagtcaaaacactatcatctactaaagtaattcgataattagtccgctttaaatgtttagtttgatatttttcgatcttaattttatttttaccggctaattgcatcaaataagctgtaaatgctttaacatttggtttatcagcttcatccaaaatttgcgcagcagtaggtgatatatctggaatttcataattatgtactaaatcgcgctctatttttggcttaaccccaacttttttaataaaaaagcctctaattatcaccacaaaaccgacaagtactgaaatgatcatcaatcctatactaagcatctgcttacgctgacgcttctgattagcttcttttgctaatgctgcttcttgtttttcaattgctcttttcttattttctttaacaatattctgattagcactagttaccgtagttggaaaaatcgcatgtacttcgacaccactatctcctgcaacatcatcagcagtcataataattttgccctcttttggcaaaacctgagtgtaaccacttagtggcccatgagcccaagcttttagccccttaactgccccaggaaaaatcacttcagcacgcacatgatctaagtcagtatcccaaccattaccaactattttaaagttcagctcagctgtatcaagataattagtaattgcccggtgaattagataagaatactcaactttaaccttatcattttccttaattcgatgataaaccttaaaattataagaattgccctgcttttgcaatttatacgtattatttttgcccgttgttgcggcctttatattttgtccatcgaccttaacctgaatgttgctcaacttctgttttacagccagattttgcttataataaaggccacgagcatcactatcaaatgaatacttaattgttcgatacattgtcagtgaaccatctttattaactcttgctatggctctaacattatcaatatcataatcaacatcagctctaacgctttgaccccaaatagcaaaaacgctcaataggcttaataaagccaataaaccaaggtatttcttcttcattatttatttcccatttttctgcaaaaatttatcaattaaagtatctgctcgactatgatatttacctttaaaatcatgacctgcacccttaaataagtataatttcgagtgcttaaattttttattagccataattgaataagaatctggaataatcatgtcacttgtaccatgcattattaaaactggaccatgatacttagttgcttcttttaacaagttatacttgaacaagttttcaaaataggccttaccaattgtgaagccaaataggttgagcttgtctggcacttgtttttctgatttaaaagccgctttcgcataatcagtgatcgaaaaggcagggtaaagcaaaatcaatgactttacttcttgcggatatttacttgcgagcattgcggcaactgctccaccttgactctcgcctagcaaagacacttgtttacggtcaacatcagtcctatttttaattgtatttaataccagctgtagattcttttcttctgtaaaaattgacatctttaattgatctacaccactactttgaccattcttagctccaccaggaaaatcaaaagtataggcaacatagccacaactagctaaatatttagcataactggttagatcacggtaatttcctgccaatccgtgagccaaaattactgctttcttcttaccagctaaaccctgtggtagatatatatgaccataaatatcaacgccatcttgttgaattcgcaaaacttggtctatcacttgatacttagcctgtttttccttagattgctgtttatcgactttaaccgttttaactgacgacttagccttcttaggcgtagtactttttatagtacaacccgttaaagtcagtagcatcaatattattgctataaatctttttttcaagtttatttcatccctatcagttaattaattcaggcgtttcctgaatacttttaattatacaaaaaacggcatgaaaaaaggaattaaacctttaagcttaattccttcttgataaattcaattttttaattaaaagttagccgccttaacgtacatgttacgtccgattcggtaacagcttttaccattaacgcgcatccgtgaaccataggtcttaattggcgtaccttttctaagcactctccagttagcgcggtttcccttgttattatatacataagcattgtgcttaagtacacgtgaattacctaaaacattacttgccataatgtaacgaccattgcccatgtttaaggcagtcttaccattatcaagagtcactacaccataatgagtaatattagtataagctgcatagtagccgctttgacgctcaccctttttattatagatatatgatttcttcatcacatagccagcagttgctgaacccttatcatcatctgatgaagtactcttattcgaagtatttgatgaagcatttgaagagctagcagaattggtgttgctggtagctggagcttgtgaaattgcgccattgttggaagttacattaccgtcaattgataatggtaaaacagcaatatttccatcaacgcttaatcccttccaattatcagtaaattgccaaattgaaacgccattcattgatgggaagtaattgaagtttggactatcaattctacctgaaatagcgtatgaagcgacccacaatgagttaggatacttggcaattacactattagtatcaatattattttgtaaaactgatgaactagcataaagaagtggcttatagcctgcattttttatagtgtccataaaagcaataattgcattagccgttggcgttttaccaccgtaaatgttattgcccgaacctgtttcataatcacaagcaatatatgaacctttaggtaagccgaatgcttgggcagcttgaactgcataatttgcttctgcagcagcagcacttgcatttgaactaaaagtagcaaagtgatatgccattggcatcatattatttgataaagccgttgaaatttgacttgatgccttagggttacgataggaagtaccttcgctaactttaacaattgcaaattgtgctccagcttgcgcatgacttgacaagtcagcgttttgataactagcaacatcaactccaagtgcgcgggctgcaacagaggtagttgcagcgttcacaactgcagtttgtggtatatttacttgtgtcagcgctacccctgccgtaccaagaacagtcgcgcatgccaatctaacaatgatttttttggttgtagtcaatcttaattcctccgataatgttaaaaatagttgtcgttcacacttgtcgatcctattttttggaaatcaattttagaataagctcgttccaaactttagtcaactgattcactaataatgtaagattaagttaataattgtcatatatttgtatcatacaatatcaaatgtaaaaaaatattgtctttgtagtaaaatttagcacatagatacctaaggtatgtaaaaagcctgtaagaccaatgcttacaggcataatttatgatccgggtgagattcgaacccacgacccacagtttagaagactgttgctctatccagctgagctaccagaccatcttgtatgtttgtacgtcctcaacagaacatagactattatagggaaacgttaattaaaatgcaagaggatttttcaaaaaagtttttattttttcaaattcaattaaagtataattgagttaacatagataattattagaaaagagaacaattatggaacttaaagataaaatcaaaaagtttgttactgactttagagatggtgcatatcagcatgacaccaaacgtgacagtggcttgcctcacgacatccctgaagttgaacgtcttgataatctgccttatggtccagatgaaaagtggcatactttagatgtttatttacccaaaaagcacgaagctcccttccctgtcatcatcaatattcacggcggtggttgggtttatggtactaaagaaatctaccaatattatggaatgggtttagctaagcgcggttttgctttcatcaatcccaactatcgtcttgcaccagaaaacgcggaattccctgatgaattagacgatgttgatcgctacatgcattgggttgatgagcacgctgaagaatatcgtctagatcgcaacaacgtttttatcgttggcgacagcgccggtggtcaaatggctgagcagtatgtcactattttgactaatccagattatgccaagttattttcttacaaaccattgaacttaaaatttagggctgtcggcttgaattgtgctgcttccttcatgttaaccccaagcaatttagatggcatggctagcgcctacttcactaaaaatgcagttaacaagtatcatgaacaactcgatgttgaaaaatatatcaatcataatttcctaccaacttttttgattactgccaacaaagatttcttacatgacatgcaatttaccctgtttggcttcttactcggccgcggcgttcatgctatttgcaaatcttatggcgatgaggaaaatccacgtggtcatgttttctttgttgatcaaaaagatgaattagctgacatcgcaaatgatgaagaaattgaattttttagaaaatttttacaaaaataaggacggaaaataatgattaaattttatggttataaacgttgctctacctcacgtaaagcacgcaagtggatggatgaccatcaggtcaactacgaatttcaagatttagttgaacagccaccaaaaaaagaagacttggtaaaatggatgaccaaatatcaagatcgtggtctaaaatatttcttcaatacacacggtcaagattaccgcagagaaaatttgaaagaaaaagtgccaacaatgacgattgaagaagctgcagatatgatgtcaaaaaatggtaagttaatcaagcggccattagtcgttgatgacagtaatttaacttgcggttttaaagaagatattttcgaacaaatttggctataataaaacaagcccataacctgtaactttgtggttatgagcttgtttttatttctttaaatgaatttcacgatcaaacaattgatgcatttcttgattaaagttgtgagcaatgaatacaatcgttgcatccgtcttagtcaactgacgcaaaattttcatcgtagccgcctgatcaattgcacttgttgcctcatcaatcaaaatcaacttactctggtgtaccatgcttctagctaaaacaattttctgcctctgaccaccagaaacattcaattgatcaaggccaatcttagtctcaatgccggccgaaaacttagcaatatctcctgcaaattgaactttttcaatggctgatttaactcgacttagcaattttgaattgaacatcgtaatattttcaacaatcgttactgggaataacactggatcttgcggcaaatagccaatttcagctaaatcaggttgaatcttttcacccttttgattaaagtattgaatcttgccgcgactggcttgcaattcacctaaaatcaatttgagtaaagttgattttcctgtacctgaatcacctgttagtaaaattttctctccagctttaacttggaaatctgggaaagtcacggcctcaccgtttctaaaatcgatagctaaattatggattgaaaaactaaccgcttgttctaaattacttttctgttcagactgaattttctttttagctacaaaaatctcttctcgcaatttctttgttgctcgcattcttccaccataattagcaactccttgcaaagaaccaaatagtgctccattgaagttgccaatgctggcaatcaaaccaaaagcagcccaattatttactaccaaaaatccagttaaaagaaagattagcacatctcctaatgaataagccaattgattcagataatctaattcctgatctactttttccttctcaatatttgctgcttccaagcgtcctgaattttcagcaatagtcttaaaaagcttatcgctagccaaatagcgacgaacttctgataagccaattaaccaatcacctaaagtcttcaaatactttcgattagctactgataccttttcagtagctttttgtaatggcttatccagtaatttaggtaaataaatctgaattgcggcaaaaattaaacaagcaactaacaaactccactgaaaagtcaccaagctaaaggctacaccgacaataccggctagcatccctactacatagcggaacgaatctaaatagtcattatgtaacagtttcaaatcattagtcatccgattttgcactgcactaaccgcatgcttttgactatcggcaaaataatgatctgttagttcttgccgaattaaatgcaggtaattttgaatcaacttttgccaaatgattcccgccaaattatagaataagaataccatgacatagctagacagctggattaatgtccaagttaaaaataaactcaagtttctatttttggcagcatcaaattgcaaagttaacacataatctacaactacttcgccaactgctgcaataatctgtagtcccatagccagacagaatttaattggattaagtttaaataattctttgctactcattattttccctccaagtgaacttcacgatcaaacaatgctcgttgttctacggttaaattgtgtgcaacggccaaaattgttgctctactttgcattaagttttggaagatttttgtcgttgcttgttgatcaattgcactagttgcttcatctaagtacagaatcggcttctcatgcaacaacgcccgcattaaaactaccttttgtttctgtccaccagacagcaattcctgttgtggatcaagctgtgtctctatcccatttttcaaacgcgcttgatcactatcaaaaaccgtcttatgaatcacttgtacagtttttttattaagcttaggcttaaacatagtaatattttcttgaatactgccaggaaagatcaataagtcctgtgccaaataacctaattgacgtaaatcaggtttgatcttttttcctgttttatcgcaatagattacttcacccgtacttggcttaatttgccctaacaaaacttttaataaagttgattttcctgtacctgaatcaccagtcaatacaaccttttcaccattcttcagttcaaagtcaggataagtaattctttcaccatttggatattgtactgacaagctttttatttgaacggtagcgatttgttttaaagaatcataccctttttctggtaaacacttttgcaatttagccagatcatcccgcaaagttttcgttgattttaattgcgtatatctgttcacgcaactatctacactataaaaaattccattggcaaaatatcccgctgtcagaatcgctcctaaatttacctgatgattgaaaaacaaaattccagcaataaatggaacaccaacacgaccagctatattaaatatcgcagacactaagctagtataatgtagcaatttatctcgctgatattcactctgctctagtttctgactctgttgtcccaccacctttttcaaaacaactttattctggtagcgtcgcagctcatctaaacccttgaaccatttttctaacaactgcaaaaattgcttattttggatagaaacagctttagttgctcgattggtatatttttcagtcaatttcggcactactactgcaagcaaagtaactaataatgtatagacaaccaatatccaatgaaaggtaaacagcgtaccaatagttaaaataatataaattaagtcacaaacaaaatagaagtaaacattatagtaactctcttgcactaactgcaagtcatttcccaaatgattttccatctctgagactttgtcttcaggctgctgataataatgtcgtataattcgctgtcttacctgatgaaaaagtgtctgtgtttgtttggtattttgtaaacttccccaattaaaactgacattgcagacctgtccaattaaaaattgtacaaagattaattccaaaaacagttcgaatttaccacttgcaattgcatttaactgcggactagttaagtaggtgtacattgtagttgtcagttgcgttagcgtaatcaaaaacagaactaacattgcccgctgacggttagctttaatataatctcttaaacccattattttcttcattcttttttgacaaaaacgtataatcagcaaaaaaatctctaacatgatttgtcgcaaagaaaaagcactgttctggatgctcacatcctattaacagtgcaacaaataaaggttgatttcgataaagaaaaccaccctcaattcatctactgctaatacttggtatgcaagcaaaaaatgggtgcactaaacaaggtgcaaagacagtattttgctaaacaacaaatcaaatattagagattcagtaaacgaatcatatggcaatttcctctatttctataagttaattaaaactatatcatattaatttaattttacaagctattttttatcttcagctaaatatttttgcaaaactttgaaaacaccgttctccgtattggccggtgcaatatatttcgcctgcttttttaccttgtccataccgtttgccattgcataagaatatttggcaaatttcaacatatcgatgtcattacccccatcgccaaaggcaatcaggtcatcccctgtcatccccatcttttctaggagatgctttaatccggcgcctttattaacaccttgtgtgttaacatcaatggcaaaagtagcggaagcaaaagcagaaatctggttatcgtgcttagaattaaaatctcgttcaatttctgcagccttagaactgtccattccaaatgtgatctgataaatcttatctggtaagtcattccagtcattaattacagtgctattaccagcaaagtaagccaaaaagtcgcgttcatctttttcaacattgctatgcaaatatgcaatatctcggccaaaaaccatcgtagccatttcaccatatttcacatgtacatcatgaattagctttaaaacgtcatcgcgattaagcaaataactgccagcttcttgacccttgatgattaatctcgagccattcaaagttacgaaatccattctgctggcaaacttgccaaagtcctgcttcaatctaacataaggacgccctgaagccacgataaaatgtactcctcgttgttcaaattcagtcaaaatttgatcaaattccttgtgattaaactgcttacgatcatctaaaaacgtgccgtccatatctacagcaactgccttaaatggtaaagtcattttttcaccccatcattattctattttttccaaaaataatcttatcatttttgagcatcctatttcatccgtaatctaccacgttttagtacaaaatagctaattgttaatagaacagtgctggtaagaagaaaaataaaattatcactccaaaaataatgccaacctatttttgttaaaatatctggcgttaaaatttcttctactgttgcatagatataaaaaacagcaaaaaccgatgcaattaaatagcctactccagctaatgagtaaaaaattatgctaatccattttttagtcaccataactcggtttcctagccaaacgaataaaatagccgtcactaatggcaaaacataataataccagaatcccataactatccccctgattaattttggctcattatcacatgcaaaagtaaaaaaacggtaaagaagactttaattttgggcaaaaagtgtctgggaaaaaactagcttccagatgaataaaaacgatcaagatttccttttttaagaatcttgatcgtttttttgttctctttaaaatttttaacaataaaaatcggcccttcagccaccttctttgacaatatttgttcaaattcatcatcataaaggcaattccgatatcggtttcgaccttctctttacctcgcaggtgcgttctgcgcatgccaaatacgttcttcaaatgtccgaaaactggctctacatcatattttctcatgccatagatgtgtctgccttcttcgctttggagaacttcttttgctttttcttttaaatattgccagttaggattatagcgaacttggcgctggcggccgctagctgttttagccaattgttccaattctggcgttagctggaactcgtctgcctcataaaccttaaaatcacggacctgaccagtagaacgatccttacgctggctgtaatatttgaaattgaatctgacgccatgatgatcaatgtaataatcatctttttcattgtagtaccagttgattagcttagttggatcattcttatactttctggtctgttctttttcatacatagtgtagggaataaagtacttcttgtctggatatttttcctccagcatcgaataattgtattcactgccatagccagcatcggcgacgattttgtcaaacttgtccaacacggtcatttgatccaaaaccggctccaaagttttgaaatctgtcggattaggaaagatggcataatcaactacatattgatcggtcgtgactgcttgaatattgtagccaggctttaattgaccatttttcatgtggtcttccttcatatgcataaaggtggcgtcatgatctgttttggaataactgttgcgtccggcaaagatctcttcggcttcttcatatttttgcattcttggcacataatcttttcttagccggtgcagaatcttttttagtccacgtcgcttggcttttcgaggtgaaccgccaggaatggctttgttttcctgctcaatctctttagtcagcttgttaatttctgcttcagtttcttgagctaattcctttagcccctgactagtttgaactttttctttttccatttctttgactacttctttagtaatcaattcatcataaagttcaactgcctggcctttcagcttttcatgatacttttcaaccgctttgcgccagacaaatgtatagcggttagcatcagcttcaatcttagtaccatcgataaaagcagcaccttcattgattaagccttcatcttctaacaggttagtgaagtagataaagctctttttaatcagttcattggcatggctgcttgatctaaaattattgatagtatgatatgaaatcttttgctggtcagccaagatcatcattggcagattttcttccagcatcaactcaatctttctgccagaaaaaactcttctggagtaagcaaaaagcagtattttgagcatcatggctggatgataggctgggcggcccgttttagcagtcttgcctactaaaacatcttctggaattgaatctacaaaccagctgatgacattagccaaatgattggccggaatggcaaaatctagattaagtgttaaagcagtttgacctgtgatataatttttgtacatgttagtttccacctttttgtttttattttgtgatgatttaataatatcaaggctggagctaaaagtatacaaaaagagcgttgaaacaaaaattcaacgttcttttttcatgatctgagacttagttttttcccagacacatctattctattaaactaacttaacgtgcttagcatgcctgttcttgagcttagcccaaccatcgaaaaacaatgccccaaaaagcaaaatcataataattcctgccaaaataatggcattagtcgaattagcaactgctaaactttgggctgaatcaaaatcagcaacttcgtccatttggataatcaatcctgaaaacaacatggctaagccgttcaatgttagcaagccacacagaattgttaagattttagtctttaatagcttcataaaaccatgccctttctttattaattagatgaatattatacacgcattattttataattcaagtaattggattaagaaaaggcacaaaaaatagacatacgttcgcatgcctattactaactttatttattccacaggaatttgattaatactttatctacttttggattctcatgcaacttggagtgacgtgcattttttccagtaaacttcactacctgatagcttttagcacgatctgccactaaatactttaatgacaaagatgatacattgggtactgttccatcggtttgaccaccaatatcaccaatgatgtttaaaacacgaactttatttttcggatatgtttctcttacacccgtcatttgccaatagctagaattcattttgttcggttttccggcagaattcaattttaaacctttaggttgacgaattgaggcgggaacacggctaaagttcaaaccagcaaaatgtcctgccatgccgacttgcttgactaattgtggcatcttccggttacgtccattttgcagcatataataaatgatcgaaatatttcctaaagaatggttcattttttaataccataacgcttttgcagagccttcactacattagtggcgtaaacaccatgtcgagaaaagttcaactcacggttattttcataattgacttctgcaattggatttttggcaccttttttccaacttccactcaaagaaaccttaccgttaggcgccacctcagctctaatcactgagttcgtgactccagctttctcagctgctgccaccatgtgttcttcagtatgatatgacgaaccacaccgtggaaaaataatgtcggtgttgaggtgattttagtctgacttttagtatgatcaaccttattctgattagtacaagctgtcagcgaaattgtaaatatcgttgtaagtagcaagacaagtgaaaacttttttctcatttagcatcccccatttgtttaagttcattttaaagaaaagaataccaaaataaaaatatttttcgcttattaacttccatatctattggttatagccacaattaaaagtaaaatagaaagtaattaaactgcaaaggagaaaaatatgaaatataaccaatacgcttatgtcgaaactgacttcgatcaacaagtaaaagaattaatcgacatcaatttcttacctaaaaattatgcagactggaattttaacgatttgctgggcaagctcgttaaaatgacaattgctgaagcaaaaactgacgctgctaagacaacaaaattatctgaatttgctgtttcaaatgagcaaactttagctgactttttaaaaggaaagcctgaatcaattggtactgctcaattctataatgtagccttacaattacttggctatcatgttcattatgactacgaattagtcgatccaactggctttatgcaaaagaatgctttaccttttgtccaagacatttctgatgtcaaaaagttaatctctgctttttatcgtttgctcaatactcgcgccaaaaacggtcaaattttgctcgatgtaatggctggtaaggggtactttactcaattctggggacaaaataagtttaaatttttcaatggcaaagctattcctgtcttcgataccaacaaagtaattcgtgaagttgtttacgttgaaactgatcttgatactgatcatgatggtaagagtgacttgattcaagttactgttttccgaccagctgaaactaacaaaggcttaaaagtgcctgccctttatactgcttcaccatatttcggcggaattatcgctaatgaaaagcgtaaccataatgttgatgaaaatttatctgatgccgccgattggaatgatccacaatatgttcatgcaccaatagttaaagcaaagcagccagacgactctaaccacccagctaccgaagaagcagtacataaatcttcttatccattaaatgagtatatgcttgctcgtggttttgccagtgtttttgctggagcaatcggtacccgtggtagtgatggggttcgtattactggtgcacctgaagaaactgaatcagctgctgcagttatcgaatggctccacggcgatcgtattgcttacactgaccgtactagatctgttcaaaccaaagctgactggtgcaatggcaatatcgggatgactggtcgttcatatttaggcactttgcaaattgctattgccactactggggttaaaggtttgaaaactgtggtttctgaagctgctatttcttcttggtatgactattaccgtgaacacggtttggtaatcgcacccgaagcctgccaaggtgaagaccttgatttactggctgaaacttgtcaatcaaacttgtgggatgcaggttcttacttgaagatcaaaccggaatacgacaagatgcaaaaagagcttttaacaaaagaagaccgtgaaaccggtcaatattccaacttttgggaagcaagaaactaccgccatcacgctgacggcatcaaatgttcttggatttctgttcacggtttaaatgactggaacgttaagccaaagaatgtttataaaatttggcaactagtcaaaaaaatgccaatgaagcatcatcttttcctacaccaaggtcctcactacaatatgaacaactttgtttctattgattttactgacttaatgaacctttggtttgtacatgaattactagggattgaaaacaatgcttacaagcaatggccaaccgtcatgatccaggacaacttgcaagctgacaagtggcacgaagaaaaggattggtcaaatgaattaggtcaaaagaagacctactacccaactgatgacggcgagcttttccaagatggcaatggcaatgcacaacaatcatttgtcgatgaaggtggcattgaatttaagaaggctgacatctcagaaagcgactggctatacaagttcatctgtggtgatgaaaaatgggctaaaccaagtttgcgttttgaaacagacgaatttattcacccaactacgattgtcggtcgtcctgaagtaaaagttagagttaaaggcagcttacctaagggacaaatttctgttgctttagttgaattgggagaaagaagacgcttaaccgctacacctaagttcttaatgcgcggcggtcaagaacttggctatagatttggcactgatactttgcaagaatttgtgccggacaagaagactaaggctaagttgatcactaagggtcacatgaacttacaaaactataaggacatgaaaagacctgagaagattgatgctgacaagttctacgatttagacttcttgcttcaacctacctactacactcttccatctggtagtaagttggccttgatcatctactcaactgatgaaggaatgactaaacgaccacttgaagaagaaacttatacagttgatttggccaatactgaaattaagttctatgagaaataattttttattcaaatattttcttatattcaccatagccagcctgttccaactgatcatatggaataaatctcaatgctgcggaattaatgcagtaacgtaaaccaccttgatccactgggccgtcagtaaaaacatgacctaagtgagaatcagcttcgggacttttaacttctgttctctccattccgtgcgattgatcgcggtggtaagttaatttcttaattggcttagtaaaactaggccaaccacagcctgcattatacttatctaagcttgaaaaaagtggctcacctgacactacatcaacgtaaatccccttttcataaaaatcatcatattttccggtaaaaggatattctgtagcagccttttgagttacgttatattcctcatcagttagccgctttaaagcttgctctttttcttctttgttaaaagtcatcggatcattcctttgctaaatatgttcagtagtacttggaaagaaattatctattttcttttcataaatatcaaatttatattttgtcaaaaattgatttgatggatcatatattctaacctgaagcatctcatttttgccattcatatgcacttctttatttgaaacttccaaaaatggcttaaatgcagcaatcagattttgataagaactataaacatgcacattatgttcgacaatttctccattacgtgcataccgacgaccgtcgatcacgtatactgtattatcactcatagaaatcatcctctctttggcttctacttatattttaattcattttatatttattcatgacttttttactcaaaaactccaacaattatcatgttggagttcattcaatatttatttaaaattcattaaaatactgaggtcaaaactgcaccggcaacaattaatattaaaccgatcacagtataaataagacctttttgtgtcttcttttcgtgtaagaaaaggataccaccaagagtagaaataacaacacaaagttgtgacataacaaaggctaggtttacaccgttcatcttaactgaaacaatgtatgcaagagcagcaattgcgtaaatcacaccggcaggaattacttgataactttctttttccttaaagacttgtgtttgcttagttgcaattaaataaacaattgctgcaaccaacattccaatggtttcagcaaagaaaatcattacgctgtcacccttcaaggcctttggaatggaacttgaagtaatgtaaccaagtgtagtcaataccagcacaatcattgtagtggtctgattcttttttccaccctcagatgtacctttgtcagtcaatgatgtaaatgctacaccaataattaaagctaagatccctaaaaatccaaacaatttagcttgagtgcttgcccattcaccaaagatcaacacacctacaagtggcactccgatcaactgcaaaccagttgaaattggcatagtttcagaaaccccaaccttggaataactgtaatactgaccaacttgaccaataacccaagcagcaccagctaacattgctaaaataaaagtagtcgcattaaaagatggacgcttaatgagagtaactgcagcaccaaagataaatgcaccaataacggtacctaaaatttggtggtaaatgttactcttcttgacaccagcaacaaacatgggcataagaccccatcctattgccggaataaacagaaataaataactcattcgttttgtctcccttattaatgtaaaaaagttacaaaaagcattctatcaacgaaagcgcttttaatgcaagcgatttactattaatggatgacaagtgcaaatcaatatatatcagaacaccaagagttatttaaattatttttataaaaatcctacggcaaagcctattccatataggaatatacaaattattcccaaatacaataagcaccatttagccacttgcttcaaaattattgattcagatccatcttgtccaattgcagctgaagcaacagctatactctgaggtgagatcatctttccagcagttgctcccaccatatttgaaccaactacccaattactatttacgcctaaagccttagctgaagacaattgcaggttaccaaaaagaacattagctgaggtatcagatcctgtaataaacgtaccccaagcaccaattaacggtgcaactaatggatatattggtcccattagaactactaatgctgccgcaattgctgaagtcattcctgcgtagcccattaccttggctaaagccacaatagaacaaattgtaattaatgttttccacaatccaaaaattgttgattttaagatttgtcctaatttcttgaaactaactttttgaattaatccaccaataaaagtagctagcaaaattaatgttcctggtgaagaaagccaattaatcttaaacagttctgtatctttcccagtatataccttaatataagaagtcacttttcccaatagatgctgaatatctggaaacagtgatgaagcaagaaccacaaatacgaacactaaaataaatggtgaacttgcacgcaaaatttcgatagcgctgtgcttctcaatattctcttttatgtcattatcttgatgatgatataattttgccatcagaactgtagtcaaaatacaacaaattgaaccaacaattgctggtaactctggaccaacaaattttgctaccaaaatttgcggaattgaaaatgacaaaccagacatcagggtaattaatcccactcctttgatagctttaactccgccacctgttagaatcaccaataaaaacggaattataataattaataatgcaagttgtaaagtaataacaaatgataatggagtaacgggcaaattagttacgtcactcagtgtaatcactggtaatccaattgcaccaaaggcagttggtgtagtattagcaattaaacaaattacggcggcattaatcggattaagaccaaatccaattaatatcccagcgggaattgcaactgctgtcccaaaacctgcaattgcttctaagaatccgccaaatccccatgcgataatcaaaactaaaatacgctgatcagtagtgattgacgacaaagtatcttgaataattttaattccacctgaataattgcttacattataagtaaacagtgcagccacgattacataaacaattggccatagccccatcagaatgccctctaaagcacccgtcaaagtgtcaactatagagaggttaaatcccagtatagccaatacgatagtaattaatagtccaatgctgcatgctttaatagcaggcgtttttcgaattgccaaagagtaaataagccaaataattggaattaaagccaataaaaacgaaatccacatttttattcccccctaaacacttcacttccttatctcagattataaatgtattcgcttacgaaagatagtgaaatactcttactcatggctctataataaagtttgtgatacatatttttttcacaatatcttgattgaatgctatctatcgtttatttatctcagaattattagctcacttgtgaaaataattttttgcataaaaaataatgcattctcctacttcaatagagaaatgcattatttttatctattcaactatcctacttcaaagcatcagtagcaaatgatctattctccaagctagtaagcaaagcatctgcagtatcaagtgctgtaattaatggtacattttgaccaatggcaacctgtctaatgatgaagccatcagaattcttttcaatatcgtgacccatcgtattgataaccaagtcaatcttgccatttcttaattcattcaagatattatccttggcgtcttcatcttcatgcactttagttactggatcaacatgcaaattatgactgcgcaagaaatcagctgtacccttagtagcaaagattctgtagccaatccgcgcaaatctcttggcaattggtaaaatcttttctttgtctcgatcttcgatggtaagtaatacattaccattttcaggcaattgcatcttagcacctgcaaaagctttgtagagagctttggcaaaagtgtgatcactccccattacttcacctgtcgatttcatttctggcccgagatatgcatcaacgtccgataatttgctgaaggagaagactggtgctttaacagagatcatgtctggctctggggcaagaccatcaccgtagccctgttcagccaaactttcgcccataattactcgggtagcgacctgagccatttcaatacccgtgatcttgcttaaaaatggcactgttctacttgcccgagggttaacttcaattacgtaaacttcaccatctctgacaatgaattgaatgttcataatgccgacacagttcaaagtcaaagcaagctttctagtgacatcagtaatcttttctttaacttcatcagagaaggtttgtggtggataaacagccattgagtcaccagagtggacaccggcatgctcaatatgttccatgattcctggcaaaagaacttccttaccatcactaattgcatcaacatcacattcacgaccatcaagataatcatcaaccaagattgggtggtctgctgcaatatcaacgtggtcttgcaagtattcttctaactctcccttggtgtagacaatttccatcgccttaccacccaaaacataacttggacggactaaaactggatagcctagcttatcagcagcttcaagtacgccttcatgagtagttgcagttaaaccttgaggctgattcaaatgaagttgcttaatgatttgatcaaacagttcacggtcttctgcacggttaacatcagctactttagtgcctaaaatcttgacgccatgttcttctaagccatgagccaaattgattgaggtttgaccaccaaattgaacaatcacgccttctggcttttccaagtcgcagacattcaagacatcttccaaagttaatggttcaaagtataatttatctgagatagagaagtcagttgaaacagtttcaggattagaattgataacaattgcttcgtagcccatcttttgcaaggccttgacacagtgaacagtcgcataatcgaattcaacaccttgaccgattctgattggacctgagccaataacgatcaccgacttcttaccagtcttatgtgattcattttcagcatcataagttgaataaaagtatggtgtctttgattcaaactcagcagcacatgtatcaaccatcttgtagactgggatgatgccatgctttttccgaaatgctcttacctcatctgcagtttcattccacaaagaggcaatcgttggatcactaaagccatatttcttagctaagcgcaatacatcaacatcatctttattttcctcaagtgtcttttccaattcaaccatatgttgcacgatatctaaaaagtagaaattaatcttcgttaattcatgaacatcttcagctgaataaccacgtctaaatgcctcagctaaatagaagagacgatcatcttgagctttgactaatttttgctctaattggtcatcactagctacgtgtgcttctggtgagtaaagatctttttcatcaatttctagtgatcttaccgctttttgcatagcttcttctgcagtacggccaattgccataacttcaccggttgctttcatttgggtgcccaaaacgcgatcagccttagggaacttatcaaatggccagcgtggtatcttgcagactacatagtctaatgcaggttcaaattctgcataggttgttcccgttactgggttcttaatttcatccaaagtcattcctactgcaattttagcagccatcttagcaattggataaccagttgccttagaagctaaagcagatgatcttgaaacacgcggatttacttcaattacatcataattaaagctatttgggtcaagagcaagttgaacgttgcatcccccttcaattttcaaagccctaatcaaacgcagtgaacaatcacgaagcatctgatattccttatcagataaagtttgacttggtgaaaagacaattgaatcaccagtgtgaatccctaccggatcaaagttttccatgcagcagacaatcattgcattgtcatcatggtcgcgcattacttcaaattctacttctttatagcccgcaattgatttttcaatcaaacattcagttacaggggaaagttccaatccatttttggcaatctctgctaattcttcatgattattacagataccaccaccggtaccacccattgtaaaggcaggacgaacaatgatcggatagccaatctcatctccaaaagctaaggcatcttcgactgtattaactgtcttagaaggtggaactggttcacctaatgacttacataattccttaaatttttcacggtcttcggcttgttcaatagattgcagcttagtacctagaagctcgatgtgtaattcatccaaaattcctgttttggcaagttccatagccatgtttaagcccacttgaccgccaagtgttggcaaaatagcatcaggatattcttgacgaataattcgtgaaatcgattcaactgtcagaggttcaatgtacaccttatctgcaattgttgtatcagtcatgatcgtagctgggttggaattaactaaaactacttcatagccttcttcgcgcagagccaagcatgcctgtgtaccagaataatcaaattctgcagcttgaccaataataattggacctgagccaatcaccataatcttatgaatatctgttcttttaggcatgacgctcttcttcctttctctgatcaatcattgacataaagtcgtcgaataatgaaacctcatcatgaggacccggtgttgcatcagggtgaaattgcactgaaaatgcaggatatttcttatgacgtaatccttcaaccgtcccatcattgacttcaacgtgggtaatcattaagttatccttgtcaattgaatctgcagacacagcataaccatggttttgtgaagtaaaaccaatattaccagttgcaatctctcgtacagggtgattaaaaccgcggtgcccaaatttcatcttgtaagttttagccccattagctaaagcaaagacttggtgtcccatacaaattcccatcaaaggaacatgcttttctacttcacgcaccattttagttgcctctaccatttcttctggatcaccagggccgttactcaaaagaacaccatctggatgaaggtttaatacttcttgggcagtagctgtatatggtaaaacaatacaattacaatcacgttctgctagttcacgcaaaatactgtgtttaattccaaagtcgataaccacaatattgcgtttcgaaccaggaactggatatggtgacttggttgatactcggctaattacaccttgagttacattcttagtctttaattctgccgcaattttttctgcattttcttttgaatctgcaatcttaccacgtaatgtaccgtgaactctcaattttttaactaattcacgcgtgtcaattccctgaatacctggaatgttcaaatgctccaaaaactttggtaaggttgtctgcattcgccaattatcaggatgacgggcaacctggtgacaaattacgcctttgatccttggctcaagtgactcataatctgccaaggtaataccatagtttccaattaaaggattagtgaaaaccaaaatctgatcggcataagattggtcggtaattgcttcttgataaccagtcatccctgttgtaaatacaacttcaccaactgtttcgcaatcagcgccaaaaccctcgccagcatagatgctaccatcttctaggattaaataccgcattattgttcatcccttctgtatacaacctgaccatcaaccatggtcattacagtttcaccatacaccttgtcgcccgtaaatggtgtattaacgccttttgacttatagtcttcttcttttaattcagtttcatggtctaagtcaaaaatcgcaatatcagctggcttacctggttcaagtaccccggcattttttaagccaaacgttttagctggtttatcggagagccatgataaaagctgctccaaggtgaagactttttcttctttgacaaatttagtatataaagtagaaaatgctgtttcactaccagtaataccaaaggctgcgcccttcatgccaccttctttttcattgcgagcatgaggagcatggtcagtcgcaattaaatcgattgtaccgtctagtagtcccactagtaacgccgcttgatcttccttatttctcaatggcggattcatcttataataaccgttgtccttaggaatatcgtcatctgttaataaaatatggtgtggcgctacttcacaggtaacattgattccacgcgccttagccattcgaaccagttccacactagttttagttgatacatggcaaatatgataatggacgcccgttttttgtgctaaaagcaagtctctagcaatttgcgttgtttctgctaattcagttactggcggcaagtttaattccttggctttaggtccttcattcacgatccctttattaaaaagcgaatcgtcttgtgcatgagtagcaatgatcaaattattttccttggctttttgcattgccaaatacatcgtttgagcagtttggactccatgaccatcattacttaaggcaaaagcacctacctttttcaatgctgcataatcaggaatgacatcagtagtttcatcattagtgattggtccatattgaaaaatatgaaccacacctttttcattgttttcttgtaccattttttgcattagctcaggcgtattaggtacaggcgttacattaggcattgcccctaccatagtaaaaccaccatgagcagcggcttcactaccggttttaatatcttccttgtaagtttgtccgggatcacgataatgaacgtggacatcaaccagtccaggactaactagcttgccacttgcatcaatctctttatctgccgttaagttagtccctattgctttaatcttttgatcttcaattaaaacatctgctttaattagacgaccattttgataaactgtgccattcttaattactgttgccattattctaatcctccaagtcgtctaccgcgcaatactgcctcgatcattgccatacgcatgaacacaccattttgcatttgtctgacaaacatgcacttatcgctttcaactaaatcaccgctaagttcaacatcatggttaattggacccggatgcatgatgatggtgtcgggcttcaatgcactatagcgttgatgattaataccatatttttcgtgatatgctttagcattaaaagtcttttcattaggatcgcctgcatgacgttcatgttgaacccgtaagagtatcatcacgtccatatttgaaactaattgatcaatttcttcatacttaccatattgatcgaattctttatcataccagtaacttggacctgagaagtaaacttcagcgcccaacctagtcaaaagttccatgtcactttttgcaaccctagaattagtaatatcaccaacaattgcaacctttaagcctttaaagtggccaaaatgttcatgaatagtcatcatatcgagcatacattggctaggatgttgaccgctaccatctccagcgttaatcacaccaatatttaaatgttgatgttcttttaagttaatcaaatcattgtaatactcattctgtgagtgacgaatcacttctaagttgacacctaaggcgttcataattaatgaagtgtcatataaggtttcacccttattaacagacgaatgagccggatcaaaaggaataactgtcaaacctagttttctttcagctatttcaaagctcgtatgtgttctagatgaatcttcaaaaaacatattagttacataaactggcttagttaaacgtggtgttgcaccgccttttttgaagtactcagctctcctgattaaggcttctacttcattactatccaaattttcaacactcacaaaatgtggtaaattaacaagatttaaattttccattttctattctttctatacaaaaaagcctgaagcatttaattgctccaggcctagagtcttcccgtgtacacgaaaagaaatcaacccttctggccctctctggagtcaattaaatggttggatatttaactatcttctttttattttggtaaagccttcagttcaactgaatctttgccgtccttatcaattacattaacagcaacctgttcatcggcagaagttggaatatttttaccaacaaaatcagcacgaattggcaattcacggtgaccacgatcaactagcactgcgactctgattgaacttgggcgaccaacgtgcatcaaagcatccatcgccgctctgattgttcgtccagtatagataacatcatcaatcaaaacaacatgcttgtcatcaatattaacaccaacttgatcagaattgacaactggatcttgctttaaactagcatcatgacgatcatcccgatataaggtaatgtccaattcaccaactggtacatcaacgccttccaatttctgaatacggtcatgaattcgtttagccaagtaaacgcctcgcgttttaatccctaccaaaaccaaatcatcggttcctttattttgttcaatgatctcgtaagtaatacgggttaaagcacgcttcattgctagtgcatcccagatttcttttgccattatagcctcctaattctgcccatgaaaaaagctcccaatctcaactgagactaggagctttagtaaagtcgaaacttaagttaagcctgccttgctagcctcacgggactaattttaaaggacattcattgctttaaagttactgtaattagaaacgtttgtcaagctctaattaaattttacttgaccaactaattcattgatatcttcaatgcctaatttttcaagttcttgcggcaaggcatctgcaatatgcttagaagcaatactatctttaaaatgagcagtaccaaccgctacggcattagcacctgctaacataaattccaccacatcttcggccgaagcaatgccacccatgccaataattggcaaagaagtaatttgacgcacttgactaatcattctaatagctattggcttaacagcctcacctgataaaccgcccatattatggcctaacagtggtctgcgttttttcacgtcaattcgcatccctagcaatgtattgatcatcgataagccatcggcaccacccttttcggcagctttagcaattacagtgatatcagtcacatttggtgttaacttcacataaattggaatattgacaactgctttaatttttctagtcaattcttcaaccacatcggcatgcacgccaaagctcattccaccttgagccacattaggacaagaaacattaatttctaaagcattaaccaagccagaatttgacagcttttgtgctacttcaacataatctgcttcactatcaccgccaacgctagccacgatcggtaattctggatattgctttctcaatggttctaacttttcactaatcaccttttccacaccaggattagtaagaccaaccgaattcaaaaccccatcatctaaaacgtcaatctgtggttgcggattacctgtggttgcatgtggcgtagttgtcttaataaccattgctccaagatcatttaagtcaaacttcttagctgcaggcacatcgccgaagccaaaagttccacttgctggcataactggatttttcaaatctaaacctggtaattttacatgtgtattaaccataattttcctccaaaatgaatgctcacggacactctttattttttcaagaaatgattctacacgtgattataattttttccaagcaaaaattttatttgtatttttacttttgaggtgttaaacttcaccttgatcaaactttaaacggtacagagagaccgcaagttcaaaatattgacttaaattatctaggaaaagtctatccttggtgtctctctgcgctaagatagactttttttgtggaggaaaaatgaaacctgtaattgttgcattagatattgacaatgaagagcaactgcataagattttgtctaaattaggcaaaccagaaaacgtctttatcaaagtcggtatggaattattctatcacgctggcaaccaagtggttaaagacttagctgagcaaggttataagattttcttggatctaaaattgcatgatatccctaataccgtttataacggggctaaacaattagctaagttaggaattacttttactaccgttcatgctttaggcggcagtcaaatgatcaaatcagctaaagacggtttaatcgcgggtacacctgctggcaaaagcgtgcctaagttactagcagtaaccgaattaacttcgatttctgatgaagtattggcacatgaacaaaattgcgcactgtcaatgaaagagcaagttctttcgctagcaaaaatggctaagcactctggagcagatggggttatttgttcaccacttgaagtaaaagaattacacgaaaaagttggcgatgactttttatatgtcacaccgggaattcggcctgctggcaatgctaaagacgatcaatctcgcgtggccacaccagcgcaagccaaagaatggggctcaagcgctattgttgttggacggccaattactttagccagtgacccagaagctgcatatgaagcaattaaaaaggagtttaactaaaatgcataaggatcaaattatcagtcaacttattcaagaaaaaattatcactatctcacctgacaaaccattcacttacgcaagtgggatgctttctccaatttacaccgaccttaggttaacggtttcatatccagaattacgcgatatgattgctggtgatttagctaatttaatcgccaaagaattccctgaggctactattattggtggcgtcgctaccgccggtattccccatgctgcatgggttgcagataaactacacttaccaatgatctatgttcgtcctaagccaaaggaccatggcaaaggccgccaaattgaaggccgcttcagtaaagatgataagatcgttttaatcgatgatttaatcaccactggtggttccgttttaaatgcagttaaagcaactgaaaaagatggcggcaacgtcattggcgtttcttcaattttcacctactacctaccggatgcaaaagaaaactttgctaaagctaatgttaaatatgctccgcttctttcctaccctgaattactcaaaaaggaaaatgagtcaggtcatatttctagcacgcaatatgatgtcttaaagacctggcacgaagatccatgggcttggggcaaacaattcgaaaaataattaagccaaaataaagaccagtttcagtttgaagcaatgtcattaagttaagacattgacaaattgaatctaatctctgtagaaccgaatcattatgatttggttctttttttgcataaaataaaggcgaaaagaacctaccttttcgccctctgattaaattattaaaccttcaaaattattgccagaaagctggtgttaattatgaaagcccttcacagaaatattttagatcgtcttgatcaaattatcaatgatactggaaagcatattcatgattttatcgatgatcctcatgccttcactaggaagcggtttttagatgcagctacagtcattaaaactactattaatatgcaaggaaaagatttgaccagtgagttgtttagagcttttggccaaaaagctattaaaaataacgataaagtagtcagtacttccgcttatgtccaacgcaaaggtcagctttcacccgcatgttttaagcatattctaactgtatttaatcagaatttatttaatatccagttatttgatcataaatatcgtatatttgccattgatgggtctgattttaatcaaatctggaatcctaaatcagagaatatcgttggaaatctcaatcataaaggaaagccatattgccaaattcatgttaatgcactctatgacctgttaaataatacttatcaagactgcatctttcagcctaagtcaaagatggatgaacgtaaagccgccgttcaaatgcttaaaaagctaaattgcggaccatatatagttactatggatcgaggttataccggctttaacatgattgaaaattgtaatcgcctgcctaactgttattatgtcatacgtactaaaacgggatatggcgcatttaaggaagtagctgagttgcctaatcaagagtgtgataaggatatagcttgctgggtgactacctctaattattattatgaaacccataaggctacagaaaacgttcatttggttaaccatcattaccgtcaatatataaaatatcggtctaaaaataccaaagatggcagctgggactttggagagttatgtacaataaaatttcgtgcctgtaaatttagaattaatgatcctaaatcaggcaaagaagaatgggaagttgttctaactaatctaaatagagccgattatcccttaaaaaggatcaaagaaatctaccatttgcgctggggcattgaaacttcattcaaaaagttgaaatatgctttaggtagcgtacagtttcattccaagcaggatagatttattgaaatggagatctatgcccacatgattatgtttaacgcagtcagtcaaattgatgctcaagcatatgtaccacaaaaaaaatgcaagtatcaatatgcgatcaatttcaaacagtcatgttttgtcatccaggctatgtatataatttcttcttcaactgaaatctttaaaaagattcttattcaaattagtcattacacaattccgatcagaccaggacgaaaagacaaaagaaatctcaaacccaaatcagctgtatattatttatatcgtgtagcctaatttctaaacaagatttgggtttatttggcatgaaaaaagagcattcaaatgcgataaatcgcaaatgaatgatcttaaaagtccaagtcgataatttgtcaatgtcttaacttaatgacattgcagtttgaagctggtctttatttttttgttttaataccaagctggcttatcaccgtcggtatttggtttatttaaaccaacattaccacgactgtctttactttggtctttaactatttcatttacataactagccacacttagacgagagacctcagttcctttaaatggggtagttgcgccttcagttatttcatagtcaacttcatctttattggtcaaccaagctggacgaataatcgtgtaatccaaatcgctagcagtaatttgatcagcagctgcacgataagtggtcaaatatgaacctaaaatattcttgttccattcaccaaatttgcctggtacctcatcatagactcctaacgaggaaatccaaatcaaacgcttaataccatcttcatccatagctttaacaactgtcttagcttgatcttcaatatttgaaccagctaaattagcataaacgatatctgcacctttaatagccggagcaagttcatccaatttacttgcatcccctacgacaatcctttcacgttgatcatcgatatcttttttatccaatttattaggatggcgtaaaaataaaattaattcattatttttatcttccaaaaataaattttctgctaatttagcaatttgtccacttgcaccaagtactgcaattttagtcatttttctttcctcatttctatcaaaatttaacttacaattacatagtaaaacttatattttgtaagtcaacgatttaccacagataacctgtatacaagtttttagttttattagttgcaaataatataaaaaataaaaaagttgtaaaattatcttagttaggagaaccaaatgaatagaaactgtcaaatcttttgtgtaaatagttctttctcgtaaattgattttttaattatttatttaatcaaagtaggattctaaggtgtcctgaacctgaccaaagcctttatgaattcgattgaaataacggtcattgtagctcattgcctggatgccaataaatgcatcaagcgactgttcagttggaaattctgccttaggcttagctttacgcttgatgacgttgttaaaggattcaatcatattggttgaataaattgaagctctgatttgtttgggataattgtagaagactagcagatcgggctcaatttccttcaaacctttgatgacatggctataagctttattccatttggcatagaatttgtgcaagacagctgcagcttcttttttgcttgtctgttgatgtatctgcttgaattcgttcatgatcttttcacgatcgtcgacgcgtactttagcgcagatattgcgcatgacatgaaccaggcagcgttgaaaatgagctttaggataagtcctggccaaggctgttttcatgccaacaacaccatcagaaagaaaaagctcaacttgcttcaagcctctggacttcatgttttgaagcatctctgtccaaacttcaatgttctcactaggagcaatgcagtagtcaatgacttccttatgtccattaggtttaatgccaatggcaatatatactgcttcacgctcaaacgtttctcggcgcaaaggaaggtatgtcgcatccaaatagacacagaaaaacttgtcgcttagcttgcgcttgtgataagcctcaatcttggggagcatctgcttggaaatatttgatacttgagctggactataatgactgccatacattttctcaatcaagtcagcgatttctctggtagttacgcctttggagtatagcttgataatcgtgctttccaaaacatcagagtgctgcttgtagtcaggcagcgtgtgctgatgaaattgaccgttgcgatcccgaggcacttgcacttcaattgggccaaattgcgtatcaactttgcggaaataagcaccatttctagagttgccagtattccagccatttctggcatagggatcatagcccagaaaggcagtcaattcagcttctaacaagttattaacagcctgttgtagctctttgcgcaataaatcatttattttgtctggattgaatagagcttgagcaaaatctttggtaaaatcattcatgaaggagttcttctttctgtatgtgtttttttgttcaaaccaatcatacgagaaaggaactcctttttctaatgtttaaagaaataaatttaaggaatcattcatccttacacaaactattttacagtctccaaataaacactggtcattttaagccaggtcatcttttatcagaaaatcaaacgcgtattaaacttaacatgtctcgtactccaattagagaagcaatcaaacaattggaaaatgaaggcttactagttcgtcaaggacaaaaaaaatcgttagccatattacattagctgaattaaaagacaattatgatttacgttctctattagagagttatgccttggaaaaaaattttcccaatttagatccacaactggctaatgattatggaataaaattccaagaaattttagcaaaacatgattggcaagcttatcttaaacttgatgaactattccatgtatttttaactgaaaataccggaaatcccacgcttcagcgaaccatcgatcttttacgtactcaaaccaatcgtatgcgttatgccatcgtagacaatgatcgttgtatgaaatcctcggttcaggaaataatggatattatttctgcagttgagaaaaaagatattttgttagcctctaacgctttaaagaagcatataaaaaatgtctatgattgggaacaacaatttttacaaaaataagatcattcatcaaaaacataaatgccttttttgctatattttgttaggataaaaaggatgtatcgtctgtaatatggggaaatgtaatgattaaaaatgcaaaacagattttagcaaaaccttttttcaaccaacatgactaaaactttggttcaagcaatttcagttgggctaactactggagttatagttagcgcatttcgctggattattgatcaaactatgaagttgctttatcaaatttatccgcaaatggcagcccagcgagtactgatcgtaccctacatcttattgatgttcattattgcaataacattaggtaaaataactgcgccttaccttgaacaagtaattggctcaggggtaccacaaatcgaggctgttcttttaaatgaaaataagatgccatggtggtccattctttggcggaaatttattggaggcttattagctatctgtcctggattaatgctaggtcgtgaaggtccttgtattgaaatgggcgcaatggttggtcaaggattagcagaaaaagtatttaaatctaacaaggaaaatttgagaacgctacaataatgcggtgtggctgcaggattggctgccgcctttagcgcgccaatagctggtgcacttttcttggtcgaagaaattacttttgattttaaacctcaaaaagtagtagccgtcttggccgccactttttcagctgacttcgttactattctagcctttggaaacaaaccattcctttatttacccgttaacgattatttacctttaattggtatctttttgggaataatggcatacatttatcaatatgtactactttcgctaaagccatggttcagtaaaattaaaaaaatccctgcagcctatcacagtatcattcctttaattttaatcccggatttaaaattgaagtgcaacactaagtgttaaacaaaaaggccatgaagacctaaacttgaagtgacgaaaaatcaagaaaggaagatcttcatgaccaattcaaattctagcatttctaagcactatcatcaattaaccagcgtacaacgtggacaaattcaagcaatgctggattccggcataacttcccgtactgttatcgctcaagaagtcggctgccataagtcgacaatcagtcgcgaaatcaaacgcggaagtgtcctgcaaagagacagcagctatttattgtatgagcactattacgctgatactgcacagatttattatgagaagcgtcgcaaaaactgctatcagcgcaatccattgaagcattatgctgtctttttgagaatgctctccagacgctttaaagctaaatttgatgccaccagcatcgatgaattcgttggtgaattcaaatgccaggctacccttgtcccagcacaccaactgtctatcgctatattgatcagggcttgctggacataagcaatattgatctgcctatgaagctcaaaagacgcaggaacaagcgtcatcacagccatggcggtcacgctttgcacaagaagcatcttggcaattccattgaacagcgtcctaaagagattgaagacagaaaagctccgctgcactgggaaggagatctggttaaaggcgtcagacgcaagaatcagcctgctttaatgactttgactgaaagaaccacacgctttgaagtagttatcaagattcctgactatcgggcaagcacatgccaaaggctgcttcaaaaggagattgacagacatcctgcctggtttaaatcaatcacgtttgacaatggctctgagtttgcggatatgaccaagatcaagggctgccagatttactttgctcacccatattctccatgggaaaggggcaccaatgaaaactgcaatggtcttttgcgtcaattcttccctaagggcaagagcatgaaagacaagtcaaaagcttatgttcaacaggcaactgatgccattaaccacaaatatcgccgaatcctccaatatcacacagcagaagaactcttcaagcaatatatttcctcatagcctaactgttgcacttaatttgacaattcaggctttaattttaattattccagttggtctatttaatgcccacttactcggtggttcacatgtgttaattgataatttattcaatttgaattggaatgtcaaagcctttggatcatgggactttttttactaccgatcttattcttgataattcggtttgtcttttcaatgctttcatatgattcttccgtacctggtggtattttcatgcctatcctagttcttggggcattattgggaataatttgcgccaatattatgataaaattgcagattattttgccaatgtacttccctcatatcctagtgatttccatggccgcatattttggtgcaatagaaaaagcaccattcacagcaattatgctactgactgaaatgattgggactgtccagcaagtattgccaatgattattgttactttcgttgcttactacattctggacattttaggtggaaaaccaatttacgaggacttacgcttgcaaatgaattatcataaaaatatgtcaataatttaggaaaatgtcccaaaattatttaattattagcggagaatttgctctccgctatttttatacgtattgatggtatttatgagctctcttttgttgctttatgaatgattctcgcttccatggatgtgacattggtggaatccactttttcttggtccttttctttttaggctcttggtctacttctggcgatattttggcattcttaggaatttctttaagcagatatacatgctcatctactgtcgttagcagttgtccatctagggcttcaattaccagacatttagttcctttcatgaagcagactaatttgccatattcatctgttgcttgataaagcttgtttttgaaagaaatagctgagccgctatcaaacactctgccagtgagaacggccaaggtataattgattttgcagtcatcaggagccttttcaaaaacataccaggctttacgactagtctgactgaagttttggttaaagtcaggaacaaacacatcatgcaggtatttatttgcctcgttgattgtcatgattccagccaatcttagttctggcttaaggcgaccttggacggtttggttagctctttcaaccatgcctttggcttgagaaacactagtagtttttagatctacgccaagagttttgcaggcatagccaaattgtgtcagcacatctttatgggcagctttggtttgagcagtctcataattgaatacagtccgattatcagtcttaaagcaaaggggaatgccatattccttaagaatttgctcaaagacgtgatagtagccattcaaagtctcttcccagtcaaaataagccccaacaataatgccagtagcgttgtcgattgcaaggtgcaggtaagccttacgcttaccaaaccagactaagacagaagcatccatctgaatttcttcgccgaagtacttgcatctttcatggcgaggatgagcatctgccaaagctagttgatgatcaactgcagcgctgacttcttgtttgctttgcttagggtgctgcttatgccatttctttttggctaaggcacgcttagtctttctccaaggcttaggggaaagaatatcctgctgcttgagcaggctgtaagctttggtataagagacatgaatgtcctcaaagcgatctaacagctgtacaaaatgttttatattgcagtcttgatatttagtacggtataaggttacaatttgattgttaatttctgtggtgagacaattaacaggtttgcggtctttgttcccatgaacgaaggccgcttttcctttagcttgatactgcttgattctcctgtttatttgtctaacggatattcctagcttcaaggctgctcttttcttattgccgttgtgatctacaagatccttaatgactttgtactgttcatcatatttcatagttaaatcaatcctattcactctaactataacctccaataaaggaaattatgtcatacttactacaattaggacattttcctaagttaacagttaagacattagagactgtcaagaagtttgtgtaaataatctctctcgttgattgacttttttatttatcttttaatcaaaataggattctagggtgtctcgaacttgcccaaatcctttatgaatcctgttaaagtaacggtcattgtaatccattgcctgaactccaataaaggtgtcaagcgactgctcagttggaaattctgttttaggcttggttttccgcttaagcctgttgttaaaggattcaatcatgttagttgagtaaattgaagctctaatagctggcggatagttgtaaaaggttaacagatcaggctcaacctgtctaagatctctaactacgtttttgtaggctttttcccagttttgatagaattcatgcagcacctgtacagccatttctttgtttgactgagtatgaatctgcttgaattcatccagtgcttttttcgatcgtcaacccgcattttggcactgatattacgcatgacgtgtaccaagcagcgttgaaaatgcgctttaggataggactggcagatagcctctttcatgccaactactccgtcagacaagaagagctctacctgttcaaggccgcgactcttgaagcctttgagcatttcgctccaaatctcaatattttcagtaggcgcaatacagtagtcaatcacttctttatgaccattaggtttgataccgatggcgatataaactgcttcgcgctcataagtgacccgcttaagaggaatataggtggcatcgagataaacgcagaagaacttatctgacagatgtcgctgatgatatgcctcaactttgggaatcatttctttagaaatattggaaaccatagctggagaataatagccgccatacattttctcaatcaaatcagcgatttctcgggttgtgacgcccttggaatagagcttgataacagtttgctctaaaacatcagtatgccttttataatctggcatagtgtgttgatgaaactcaccgtttctgtctctaggaactttgatttctatttgtccgaattgcgtatcaaccttgcggtaataagcaccatttctagaatttccggtattccagccatcgcgctcataaggattgtagcctaaaaaggcagtcaattcggattcaagcaggtcattgacagcctgttggagcttttgtctaaataaatcattaattttatcctgattgaatagagcattagccatatctttggtaaaatcattcatgaaggaatctcttttctagtatgtttttcgttcaaatcaatcatacgggaaaaggattcctttttctaatattcaggaaaataaaattaaggaaatattcatccttacacaaaatattttacggtctctatcttaaagtcattgcttcactggagtgatttagcattttcataactaaagcagtattatgattagtctgctgataaaccataaaagctcctgtttttctcattgagtgtgagccaatccaattaaccccaattttaagctcggtctgatgacaaattctataaaaactattttctcttattggaacatcctcacctaatctcctagaacttggaaatagccattcagaagaaaacagcttcgtgtagggatgcttcttttcatattcttgcagccaatcatagtaatcctctaaaacatccctaactggagttaaatataatcggttaggcttttttgtctttttgtcaacgatataagcatttttcttaactctgccattggcttgaaagacatcattctttttcaaagctagaacatcacttacccgtagtaaggttgctttaccggtttgaaatatagcatagtttctttctcccatactagtatcttcacgtaaatgtttcaaaaacttctttaaaattattggatcagtaattggacgagtatctttatgcttcaatttacgtctccttctgtcaatttttatattagtccttgatatacaagtatttcgtcactctatgttgaataattagtctatagctaattatactacataatcaacacaccccaaaattggcatagcagaataatgcatgattagatgtactatgtagaataaaatctcattattctacatagttagaaagtacaaaaaagaatgctaatttcccataaaaataagaattagcattctattgcattaaatgattaattttaacctctgcagtcgaacttgacctcagaatcgtcctctcagcataatcgaactagccttaaaattggcataattgttttacctattctagtcccaccatatcattcacgaaaccttgaagtttgtctaatagctgaatatttacgtgattaacaatttctccatttctagattcaaagtcaaaattctgaagttgccataaaacaacataaccttttactccagtgccattactgcctggaattaatattggctcgtaatgtgggttgccttgatatttatctgaagtagtaatcggcatccctataaacatatgtgttgatttattataggcactggtactcattaccacataatgtcttctaatattacctttatgcggattatggccacccatttcatgtccggaatgaggttctgcatctgctttaacaatatctccctttttcggataaatcattaatcaactacctcacgtcccactggttttactgattgtagttccacgtcattttctatgtctttttgataatcataattttgccattctttggttgcaaaaatatttttctttttcttcacgacgggtgtaaaaactatattcatcccctcatttttcacagtatactctttactagtaattattatatctttaggaactgttaaagtttttgaatttccaacttttcttaattttacagtcatagttgtacgcctctttcttttttgtgtatatttagtatacacaaaattacaaagaaagtaaattatgttttagcgttacatcaatagatggggagatattctttgttctttctcctagctatttgtccttattgcataaaaaatctaaatattttaaataaatttagcatttttcttttttgcgaatgtaactgctgagaaaactgtatataatagctcttgacccctttagaaaaggaatttagttttctatgaaaggaattaataatggacccggatttaaaattgaagtgcaacaccaagtgttaaacaaaaaggccatgaagacctaaacttgaagtgacgaaaaatcaagaaaggaagatcttcatgaccaattcaaattctagcatttctaagcactatcatcaattaaccagcgtacaacgtggacaaattcaagcaatgctggattccggcataacttcccgtactgttatcgctcaagaagtcggctgccataagtcgacaatcagtcgcgaaatcaaacgcggaagcgtcctgcaaagagacagcagctatttattgtatgagcactattacgctgatactgcacagcttcattatgagaagcgtcgcaaaaactgctatcagcgcaatccattgaagcattatgctgtctttttgagaatgctctccagacgctttaaagctaaatttgatgccaccagcatcgatgaattcgttggtgaattcaaatgccaggctacccttgtcccagcacaccaaccgtctatcgctatattgatcagggcttgctggacataagcaatattgatctgcctatgaagctcaaaagacgcaggaacaagcgtcatcacggccatagcggtcatgctttgcacaagaagcatcttggcaattccattgaacagcgtcctaaagagattgaagacagaaaaacgccgctgcactgggaaggagatctggttaaaggcgtcagacgcaagaatcagcctgctttaatgactttgaccgaaagaaccacacgctttgaagtagttatcaagattcctgactatcgggcaagcacatgcccaaggctgcttcaaaatgagattgacagacatcctgcctggtttaaatcgatcacgtttgacaatggctctgagtttgcggatatgaccaagatcaaaggctgccagatctacttcgcccacccatattctccatgggaaagaggcaccaatgagaactgcaatggacttctgcgtcaattcttccctaaaggcaaaagcatgaaagataagtcagctgcttatgttcaacaggcaactgatgccattaaccgcaaacatcgtcgaatccttcaatatcacacagcagaagaactcttcaagcaatatatttcctcatagcctaactgttgcacttaatttgacaattcaggttttagaatatgctatacttactgatagaaagtgtgtaggatttacatataaaggtgtaaaacatggcagtaactattaaagaaatagctaaaaaagccggcgtttctattgccaccgtttcgcgatatcttaatcagaatggttacgttggcattgattcggctttaaaaataaaggaagctatcaaaaaactgggttataaacccaagaatgcaatttccgctaaaacagaattaaacttaattgaaatcaatttttcgcaaatcaataatcctttctattcagaactgtatgaatacttggctactattttgcaggataaaggttatgattgcattttgcatttagatcattatcaagagcaagatatgcagtattatttggataaatataagcaaaaaaagatcgtaggcttacttaccagctcgccaattcagatttcaaagaagagtggcaagcttaatctaccggtggttagttttgaccgggtaattagtccgcagatccctactgtgcagtcgaataactatgatgcggagatgcaaattgcaaagtcggttttaaagcaaaaaaagaagaaagtaatcattattgctggttccaaagaagactattatccaatcagtgatcgtatcaaagggatgatgtgtgtgtttaatacctttgacgttaaatttgatttacgctcaattagcgcccgtgaatcaattatcgcatcgtaatcgctatccttcaatttttgaaagataacgattacgatgcgatttgttgtacggatgacattacggctttattggctaaagaatgcaacgattatttaaataaaaaatcgttaattacaggatttgacggcacacaattgattcagaacctattcccacatttaattagtgcgcggcaacggactaaagagattgcgaaattaatgatccagcggtatcattggagagtttttatactttgcccgttagcttgattaatcaggattaaaaaaacaggattgcccattttggaaacaatcttgttttttaatatttttaattaactatctaaatctaaccaattcttttaacatttctagccttaataaagctaccatcttttaattgatagaatttcttccctttaatcttaacgaccttatcagaatgaagtgaaatatgcttattcttcttaagtaaaatgcgctttccattcttcttaactgctttaccatgcttattataaacgaatgagttatgagctaacttatagtaactaacagtattagcaactttgacaaattgatttttagctactttatagaacaacttacctttaatactatactttttaccattatccaaaggcttaattgtatctccagctttcaagacaagcttgttatcattttgataaataggatttgcttcactgtcatacacataagcattatgggtcaataatatttcagtggttgtattatcctgagtagaaactgtagtagtctcttctgatccattaattatatttttagtattgtctataatactattttcacttggagcttcaggtgtaataattgtttcttgcggaacaattggattggctggcttttgatccggaatccttggattttctggtgtagttggtttacctggcttatcacctggagtggttggacttacaggctgatctggttttggcacgtctggtaaaaccattgttccatcttcatcaactacaagtgtacttaatggtgccagcatagttttatcacttaatttcacattgccatcactatctaacaatttcttaccatgtgataaatcaacattatttagagcaactttatcattgttgacattaaagacaattaataacttcttgccattaacattatattcgtactcaaatacacccttgatgtttttatctttggtttctctaccataactaataattttagtaacattctcgtcataaatcttattgaaatcattcaaatgcaaaattggcagctgtttacgtaatttagccaatttttggaaatattggactgatgctttattagcaccaactctttcccaattaatttcattaatatttactggtgaattatatgaatttgaattgccacctttagttcttaatgcttcttgacctgagtggaagaaagaaataccctgtgaaagcatgatcattgagttagccaatcttactctcctggcaatattctcatctgattcatttggcattgcagccttgatgtaatcatacaacgtcttaccatcatgacaagcggcataattaaccatttggcttggagttgcatagttatgtggctcccaagaatcattatgtaaccatttacctcttaaaaaactatcggtaaacaagacagcatgcttatcaaagtttttttcattaccgttaccaattactaatcctggttcggagccatcattattacctttaaccgagtttctcatatcatcactaaagaaaccaacattaggaactttatccgcagtgtattgggtcgttccttcttctctagtatatttctggttaccaacttcccagccttcaccataagtaataataccaggatcaatcttatctagagcagctctaacatcattcatagtctctcgatctagtaaggacatgatatcaaaacggaagccatctagattgtagttcttagcccagtaaactactgagtcaacaatgtacttgcgaaccattttacgttgactaccaatgtcattaccgcagccactatcacttgtggtattattatcagcatcgtaacggaaataatatcctggcactgttaattcaaaagcttgctcttgaggattataaacatggttgtataccacgtccataatgaccctaataccagctttatgcaggccattaatcatttctttcatttcgataattctagcagttggattagttggatcagaagaatatgatccttcaggcacatcataattctttggatcgtaaccccagttgtattgattctttaaactcttagtttcatcaatgctagcgaaatcatatgaaggcataatttgaacatgagtgatgcctaatgccttgagatagtctaaaccagtaacttgtccagttggtgtcttacctgattcaatcatccctaagaacttacctttatctttaattcctgagttaggatcactactaaagtcacgaattgaaatttcataaacgattgcatcagttggcttagagaatgaaggcattcggttaaaatctgtcggtttgatattattgtagtcttcaattacacttctaacgccattgacagtaacggctttagaatatggatcatcagtctgtgttattttgccattaccaaaagttaacttaaaatcataagcccagccttttttatcgcccttaataataccagtccaaacacctctatcgcctcttgtcaaagcaataacattcgtaggcttggcactattatcaacactatcatataaattcaattcaacatctttagcagttggagcccagagtttaatttgcgtctttttactatcataggtgcagcctagatcgtcaccatcataggcatatttatcgtcaaaagctttggaacgaacataaggaccgatatcaacatttttaaagttcatccctagtccaacttggttatcctttaaaatatcaatatctgttttggtatgaataataaatttctttgctttaccatcagcattagcatcgactgcttcaatatgatcaatactattatttcgcagactaagttttcctttaattttatcgacagtagtagccttacctgcttcaacagtcaaactatctggtgaagtcatatatgcagaagatagactttgatcagctaaggcaaaactcttgctataataagcttctgtatcatttttaactaaataaatatctgtcgccttattacccggtaacggagtgaattctcttgttatttcatcagaaccaactggcgcaacaaaaagtttactaaaatcagtattgtctaatttgattgagccatcttgactattgccttgtttggttaagctaataagttgtttattatcttgatccttatctgtccaaacattaaccttattaacttggtcatcaccgtaataatgcaaatttatatttgcggaatggtactctggtgttaccttttgggcatcatcactacctgctttatagaagacttccgctttgccattatcgctaacatttaagctacgatcagcacctgtaccgtctttaccagcccaactgcctttggttttaattaaaactcctacttggtcatagtttttatctaaatcaataaccgagtaatacccattatcatctttgccggcccatttgtattcattgccgttaccattaggtttcttaccccaaatataaggaacccatttttcaccatcaccattgtagtgaataactactttagtctgatctttaacttcctcacgtgctggagagttatttgttccctcatctttagttttggctgccaaaactgtaggaacgttttgaggagctacaccttgttgacgctgctttgcttttgcgttactttgattttgtacagtagcagtagctgcattatctttgctagaattcgtttggcctacaacttctgaacttttaggagctgcattgtcttctgcagcatgaacttgagtcgtagttaagtttgcccctaaccaaagactcataatagctgaagtacatacaaaaattgatttaaatttgatattatgaccactctttttattcataaataaattcctccacaaaatcatgttttttcaaattcaacaataaacgtatgcgctttcatttgcaatataaaaatgatttctgttatcgataacattatattcacaaaattcatttttaatagttaaacaacttttatctatgtttaaatcaattattaatatgtttgaattgagtagtgaagaaatttaatctgaaactgtcaaattttttgtgtaaatagatttttctcgtagattgattttttaattatttatttaatcaaagtaggattctaaggtgtcctgaacctgaccaaagcctttatgaattcgattgaaataacggtcattgtagctcattgcctgaataccaataaaagcatcaagcgactgttcagttggaaactctgccttaggcttagctttgcgcttgatcacattgttaaatgattcaatcatgttagtcgaataaattgaagctctgatctgcttgggatagttataaaagaccagcagatctggttctatgtctttcaagcttctgataacatggctgtaaaccttgccccatttggtatagaagtcatgcaggacagctgtggcttcttctttgtttgtctgttgatgcacctgtttgaattcgttcatgatcttttcacgatcgtcgacgcgtactttagcgcagatattgcgcatgacatgaaccaaacagcgttgaaaatgagctttaggataagtcctggccaaggctgttttcatgccaacaacaccatcagaaagaaagagttcaacttgcttcaagcctctggacttcatgttttgaagcatctctgtccagacttcaatgttctcactaggagcaatgcagtagtcaatgacttccttatgtccattaggtttaatgccaatggcaatatagactgcttcacgctcaaacgtttctcggcgcaaaggaaggtatgtcgcatccaaatagacgcagaaaaacttgtcgcttagcttgcgtttgtggtaagcctcaacctttggaatcatctgcttggaaatatttgatacctgagctggactgtaatggctgccatacatcttttcaattagatcggctatttccctggtagttacgcccttggagtaaagcttgataatcatgctttccaagatatccgagtgctgcttgtagtcaggcagcgtgtgctgatgaaattgaccgttgcgatcccgaggcacttgcacttcaattgggccaaattgcgtatcaactttgcggaaataagcaccatttctagagttgccagtattccagccatttctggcatagggatcatagcccagaaaggcagtcaattcagcttctagcaagttattaacagcctgttgtagttctttgcgcaataaatcatttattttgtctggattgaatagagcttgagcaaaatctttggtaaaatcattcatgaaggagttcttctttctgtatgtgtttttttgttcaaaccaatcatacgagaaaggaactcctttttctaatgtttaaagaaataaatttaaggaatcattcatccttacacaaactattttacagtctccaaaaaactttcttaatcttctttattattcgttataatacgcgtggtgctagttaaatcgttctagacaataagccaaattataagctaaaattgcaatttccaaccggctttgaaagcctatcagactacgtgctcgattgttctcggcattgtaataggtcagaagcgaaaagtcgctttcaattgttctgcgaatagccatcaattgatgatcattgtgctttttagctcctgtcatatttttacgatatggtgtccaaagttcgtaacccatttgttttagctgttgatgcagttctttgcctaaatagccttcgtcgccaagaagatagtaattagatggatgggtattttctatcagttcaactgtctccctggcatcatgaactgatgcctttgttacgacataatcaagaatgtaaccgtcatcgctaacaatggcatgaactttgaaaccatagaagtaaattttcttggtggccttataaccaatgttggcataaccgcgaaaaattttagcacgatagtttcgaattggttggcaaacaggtaccggaaagctgtcaatgatcaagaactgtccattcaggtcaacctttttattcatttcttgccgtatctgataaatcaattgcaatagctgacgtgaacgccgattaaaacgtgagtgtgataaacaattgaaacattcacagaatcttctttgtgattcaattcctgtcttagcttgccagataagtaaagccaaaatcagactgtccgtagttttaatttgatcaatatttcgccgatgagtaaactcagccggtgcatacaaacgataccagtgccgacaaattatcactaaatctttaaaactaacttgtaaatggtggctaaaacgcttaagcttaaggcagttcaatcagatcagactcttttctattattactatttacaagtcgagtctaacaagattggacttttttattaactaaaacgatttaactagcaccacgcgtgttataattaaaaacagaataacttacaaagcagggattaaaatgactaatcggtataaaagtgtttttgacattattggccccgtaatggtgggaccatcaagttcacatacggccggagccgtcgctattggacgcgctggttacaaactttttggcggtaccccgagtaaagttaccgttcattattacgactctttcgcccaaactcaccgtggtcatggaacagactatgctattgcggcaggtattttaggctttgactcagacgatctacgcgtaccaaaggcacctgagattgcacgccagcgcggcgtagatttacgttttgttgaagaagatggtcctagcccaattggtcaccctaatactgctattttaaatatgtctaatgataaaaagaaagtggaattggctggatgctctatcggtggtggtgcaattgaaattcgcaaaattgtcttacataataccgagattcaacctgctggtgcattacctattattattttagttgatccacacaaaaatattcgcattgaacaagagcttaccgcgctcttacacgaaaaagcaccctttagtcgcaaacgaatttttcatactaaaaactataatatttatgaatatgatgtagaaaattatcttcatcctgatttattgcaagaactaaataaaaaatttgagaatattatttgtttataacatagggcaatattatgtataaccatattaaggaaattgttgctgcagcagaaaaaacgcacaaacctatttctgaattaattattgaacaagaatgtcaactatcaggcttgccacgagaaaaagtctggcagcgcatgaaatataacttgcaaactatgcgagctgccgttaaaagaggtgaatctggaaacggtgtcttttcaaaaactggcttaactggtggcgaagcaattaagctgaaaaaatatcgcgagaaaggacacacactttcaggcgatacaatgatggcagcagttgaaaatgccatagccactaacgaagtcaatgcagcgatgggcgttgtctgcgctaccccgacggctggttcttccggcactttacctggcgttctatttttattagaaaaaagattacagctcagcgaagagcaaatgattcgctttctttttactgctggcggttttggcatggtgattgccaataatgccgaaattgcgggggcaactggcggctgtcaagcagaagtcggtagtgcctcagccatgggtgctgccgcggcagttgaagtagctggtggcagtgctgaacaaagtgcccaagctttatcgattgcgatgtctaacttgcttgggttagtctgtgatccgattgccggtttggttgaagttccctgcgtcaaaagaaatggtattggcgctggtaatgcacttatcgcagctgatatggcgctagcgggatgtacaagtgtaatcccagctgatgaatgtattgaagcaatgaagaaagttggtcatcaaatgccggcatctctgcgtgaaactggaatcggcggtttagctggtacaccaacaggtcaagcaattaaagcaaaaatttttggtaaagatgcgtaggtaacacaatgcgtgatagcaaaacaattaaaaacgatattattgaacatttagctcaagttattgacccagaattaaacgtcgatgtggtcaacttggggctgatttatgaaattgacctcgatcaagatgggatctgtctcatcaatatgacattaactacacctgcctgtcctttgactgattatttgatcaagcagattacaacagccgttaaaaaagtccctgaagttaaaaatgttgatgtagaatttgtctggtatcctgtttggacccctgaacggatgagtgatgcggctaaagaatacttcaaaatacaataaaaaagtctaggctaaaattttgcctaggctctttattactttccaaattatttattcaaataggccacaaacaattcagtatagatcttcacaaagttcaaatacatcttttcatcaacatattcgttaacttggtgcggcgtgtcattaccgggaccaaacatggcaaacggatagctaggtcctttgtcggcaatcaaattcgaagcatcagttactggtttaatagcaactgttggaatcggcttttccgcatattttgctccaattttttgggctaattttacaaattcagacttaccgtcagttttaattgaaggttccgacatatagatgtacattttgattttagctccttgcgcattttctgccttaactaattcagttaatttcttttcaaccaaactattattgaactcaggaatagtccgcacattaatttgcgcggtagcctctccgggaatcatgttgacctgttccccgccagtaaaaacagtagtattgaacgtcaacttacctaagtctggattgtttttatctgtttctctaaaagccttgttggccttaactaataaatccattaatggatcgatcgcattataacccttttcaggcattgagctatgagcttccttgccttgggaagttaacttagtatccatcgaacccttatgagcaatggcaatactgtagccagaaggttcaccaaccaaaagtagctagcagcctgatactaccatgcttaattaaatggtgttcatgaatattaatcatggcaataaccaaggcagctaaaccagacttcatatcagtcgctccgcggccgtacaatttaccatccttattggttaatttaaagggatcagtatgccattgatctaattcacctggtgaaacaacatccatgtgaccacaaattgctaaaatgggatggcctgttccgatttcagcaaataaatctgcgcgagttgtggaatattccaacaaacgtgaactaattccatgttctcctaatagtttttgtaaatattttgctactaaaatttcattatcattaacggattttattgcaacaagatcactcaagattttaagctcttcagtatcagtcaaaacattattctcttcaataatttaattttcctctccaaaaatcgaatcgctttcaccttgattgtagccgctgagttcttgatagtaaaaaaatatgactatcatttattcaatgacaatcatattgaaaatattaattatatttttgctttatcttactgaagcaccagttgtggtatcagtctctggttccggagctggctttccttctaacttagaagcaccagataccgcatcagtttgcttaacttgattttcgtcagttaccggatattccttgcgtctgcttggatcagtattagatggcaaattatcagcagtataagcaatgtgcgtcaatttagcatgcttaacatcatcaattgtcttgcatcccgttaattgcatatcaatctttaattcatcatttaattgttcaataactgaagcaactccatgcgcaccacctaaggctaaaccataaagatatgggcaaccgattccaacaatgtcagcacccaaagccaaagctttaaagatatgagagccacgacggacacctgaatcaaagataattggcacccgatgatttactgcttgcgcaatttctggcaaaacatcaatggtagcaggagcaccatcaacttcacgaccaccatgattagttacgtaaattccatcagcaccggctccaattgctttataggcatcttcagcacacataacacctttaacaaagactggcaaacctgattctttcttaattcttttaacatcttcaggaccaatcttttgcgcagaagaagcgtacatttgagctacgctttgacctttaccttttgcaccaaggtaacgcttaaagaagtccaatggtacaggataagtaaagttagtccgcaagtttgcttcacgataacctgataccaaagcatcaacggttaagaaaatgccttgataaccagcttttttaattgcatcaaaaaccatctgattaaaattccagtctttactcaaataaagttggaaaaaccttggtgcttctggagctgcagctgcaatttcttctacactcttattagcataagtactagaactaaagagcgcaccagccatagcagcacccttttgcgttgcgacttccgcatctttatgtgcaattccatgacaagcaattggagcgatcataattggcgtctttaagtgcatccccataaaatcagtatcagtttgcggatcagccatctcagtcaaagcacgaggtacaatttgaaaatgattaaaagcagcagtattgttacgccaggtccattcattttctgcacccgaagcaatataataatatgcaccttctggcattaccttcttaacacgttcttcaagttcatccacattcaccatcttgattttttcatcgcggtcactttgtggaaagccttcgtagtagtgggtcattcgtttttctcctctcaatatatattgtatgttaatttcattatagtttgtaagcggttttgttgcaaattgatattctaaatttatatatgatcaatcaaatttatatataaattttagtaataaaaaaatatctgtgagactgtaaaatagtttgtgtaaggatgaatgattccttaaatttatttctttaaacattagaaaaaggagttcctttctcgtatgattggtttgaacaaaaaaacacatacagaaagaagaactccttcatgaatgattttaccaaagattttgctcaagctctattcaatccagacaaaataaatgatttattgcgcaaagagctacaacaggctgttaataacttgttagaagctgaattgactgcctttctgggctatgatccctatgccagaaatggctggaatactggcaactctagaaatggtgcttatttccgcaaagttgatacgcaatttggcccaattgaagtgcaagtgccccgggatcgcaacggtcaatttcatcagcacacgctgcctggctacaagcagcactcggatatcttggaaagcatgattatcaagctttactccaagggcgtgaccaccagggaaatagccgatctaattgaaaagatgtatggcagccattacagtccagctcaggtatcaaatatttccaagcagatgattccaaaggttgaggcttaccacaaacgcaagctaagcgacaagtttttctgcgtctatttggatgcgacataccttcctttgcgccgagaaacatttgagcgtgaagcagtctatattgccattggcatcaagcctaatgggcacaaggaggtcattgactactgcattgcgcctagcgagaacattgaagtctggacagatatgcttcaaaacatgaaatcccgaggcttaaagcaagttgagctttttctttctgatggtgttgttggcatgaaaacagccttggccaggacttatcctaaagctcattttcaacgctgtttggttcatgtcatgcgcaatatctgcgctaaagtacgcgtcgacgatcgtgaaaagatcatgaacgaattcaaacaggtgcatcaacagacaaacaaagaagaagccacagctttcctgcatgacttctataccaaatggggcaaggtttacagccatgttatcagaagcttgaaagacatagaaccagatctgctggtcttttataactatcccaagcagatcagagcttcaatttattcgactaacatgattgaatcatttaacaatgtgatcaagcgcaaagctaagcctaaggcagagtttccaactgaacagtcgcttgatgcttttattggcattcaggcaatgagctacaatgaccgttatttcaatcgaattcataaaggctttggtcaggttcaggacaccttagaatcctactttgattaaataaataattaaaaaatcaatttacgagaaagatctatttacacaaaagatttgacagtttcatatctgtaagagcttacagcaaaagttgtataataaagacgttgacactattactgcaagaacttacttaaagcagattagtggcattttctttattgcatgcccttactggataggttgcactgcaaaaattaagaaaaagaggcataatttatgaaaaaaattttagcgattaattcgggtagctcttcttttaaatttaagcttttcacctttcctgatgaaaaagttatcagcgaagggatggctgatcgagttgggcttaacggctccacctttacaatcaaggttaaaggtgaaaaacaccaagaaaaagttgacattcctgattccgaaactgccgttacaatcttgcttgaaaatttaaaaaagtatgatttaattgacgatcctaaagaaatcatcggaatcggacatcgaattgttgcgggtggtgaagaatttaaggactccaccttaattgatgaaaagtcactacaaaagatttatgatttgaaacaatatgcgccgcttcataataccgctgaagccgatgtcattaatgccttcatgaaagtattgcctggcgtccctgaagtcgctgtctttgatacttcattccaccaaaccttggatccagtgcactacttgtactcacttccatataaatactatgaaaaatacggtgcaagaaaatatggcgcacatggcacttcggttagatatgttagtcaaaaagccgctgaaattatgaaacgcgacttaaaggacttgaaattaatcgtttgtcacttaggatctggtgcttcagttaccgctgtgaaagatggtaaatcattcgatacttcaatgggcttttcaccaatggcgggtattacgatgagttcccgttcaggtgatgttgatccttctttacttgcttttgtcatgaaaaaggaaaatcttgatgctgatcaaatgcttaaggttctaaacaacgaatctggtttgttaggaatttcaggcatttcaccagatatgcgtgatttacgtggtgacatgactaagctcgaaggggaaaagaagaagcgtgctgacttagctagaaacattttcattaatcgaatcattcgctatgttggtgcttatacccttgaaatgcgtggcctagatggtatcgcctttacagctggtgtcggtgaacacgactttggtgtccgtgaacatgtcatggattcactcgaacttttaggccttaagcctgattcagccgctaataaagaaaatgccaccattattaccaagcccgactcaactattgttggtatggttattccaactaatgaggaattaatgattgaacgtgatgttgtcagagtagctggcttaaagtaaaaaatagagaaaagaaataagacgaaggacaaaatccttcgtcttattttgcgtattaagccattgctttttcttttcgttcattatatgcgtaataaatccaagcaataacaccaaaggccactggaccaatagccgtccagaatgaagtttgccagtctccggtaaagagtggttctatacaagtaaagataattccgaccgcaaccactaaccaaacaacaattgtcgttgcccaaacttttttcttaccttcaataaaaacaaatggccgatctaagtcttttttagctttaaaaaatgggtaagcagcaattaaaaataaatatggtgctgatgaagaaacattcatcatatccattaaaattgtatagaattgttgtgctccattaccaccaaatgaaataaataagataataacgctaaccacaattgcttgtacccacatcgagaattcaggcatattgtgcttatttaacttaaccattttcttaggcaatagtcgcggatcacacccctcaataaatgatttaatcggtgaataaaccatcaaaaaggcagcggcaattcctgataacacatccgcaattccggccaaacgagaaaagacagttccaattgccagtgaagtagaatgtgatagacctaggctatgaccagtgacaatacctaaattattaatcaaaacatattcgacattagctaagtcaacacctttaccacctaacgatttgttccaattaacagccaccccacacataaagatgtttacaacataaagtgctgtcattaagaccatggccgtaatcagagccttaggataattcttttccggtttatcaactgaatcaattactcctgaggttgtttccagaccaccataggcaaataaagcatagacaataaatgaaataaccgcaatcggtgactgaaatgctggattaggtgaatgaaccatattttgtgcggtcactggttcagctaattgcccatgattcaaaataaagacaaaaagtgaaactgctgtaaaaccaatggcaattcctaaagtaaagatcccaccaatattattaatcgcctttattttatcaattccctttgcggcacaaaatgtaacaattactaagaaaataacttccaacacacctaataactgagttgaagtcagcgaccctaaatgccagcttggggtagtatcatgaccaaaaattgccgttgaaactgaaactaagaaaaattgggttgatgaaactaaccaaattacccaagctgccagccaaataaaagttccgataaatgatactttttcattagtagatccttcaagccatgaaaagattccacctttaattcctttaaaggaagcaccatattcagcgaaaattaaggctgatggcaggaagaataaaatagctgtgacaatataccaaatgatacttgaataacccatttgataaaaagctgtcagtgaattactaaatccaaaaatagaagaaaaaatcatcaagacaagactactaggacttatcttaacgtgatcattattcttcataaaaaataaaacaactcctttaacataaacaaacaatttctattatgaacttttatcatgatattttcaaaaagagcttttgcacacaaaaaaagcaggcctattcggtctgcttaagtaattaatcataatcttctggattaatatcaggtttaggtaaatctgaattattattcagcactactccttgaatgccattttcataggtccaatcttttaacatattcattttgccggttaaataatattgactaatcagcttgttccatctatcccacttatcaagtggggcattaattaaacctgctccatggtcaatcattaatttatttgcagctagtgtggcagtacgcttatttccgccccagaataattgattacgcatattatgatacatcaatgtcattgccttatctgtagtcgaggtatcgttgttcattaactcatcgaaaaatttttcttcttgtttgtagtttagattatctcggaagccatagcctgtcagtaataaatgtatctttagttcaatatctaaagataacaccttattttcattaataatatattgccatgctcgttttaatcgaataattctttccttatctttctcggaagccctctctatatttaacccatcagcaactaattgtgtttgaattaaagaaatatttgttttctcaaaatgcaaatcactaaatattagtcgagcaaggttagttctggcaaatcttctatttaaatcttgtgttaaatagaatttatctgggtataacatatttttacacctattatcttatcctctgcctcaacaattctggcctttgcgccagctctgcgtataaatgacgaccatttatgctaatcccctcaaattcacgccctgtatgaaagtgacctctagccagcactttacctgagcgtttcaatttaaacaaataatcattaaaggccaaataaatctgttttttatgcttgtcataggtaattccttgaacgggagaatcattgcgcataaaatctcctctagtagcgccaatctctttaggataccaactattaccctgacgagtaacttcccaatattcaaaacggtggtctgtggcatcatggtaaacggcaataaattggtgatcatttacaaaagtagcattatggaaataacgacctgttctagctgaatgattccaaactttaaaagtccaaatctgtttaatttgcaaattgtttttactaatctgcataatttcttctgattgagagctcttgcgcaataaatggttattagcaatcacataaatatactttcgagttgaaccgattgcttgtccatgtcccaatttaatatatgggcttatcttaacatgggatgcaagccgcagaaattgtgaccaaggtagccatggcaacttttgcatagtatagcgattaggcacttgattaaatttgtaagaaacaatgtgagcacgcgtatcattaggtgaatgatacattgtggcatacattgaaccatttgacacggtcaatccttctggtactagtcccaccgtcccagttaccgaatcactttgacataaagtcgcaggttgatagaaataggttttcagtttaaaatgaacactttttaaaacatgcgatttagtttccggcgcaaaacttctgccccaattaccagacgtcttatagtgcttgaaccagctacgagcactgtctccagcttgtggttttttggttgctttaacaatgccctctctagcattagctctcacttgaacaactgtctgagcatgagctttaccataagaataacttacccgatagctttcctttttacttgatgaaacttctgctcgagatactttaactttacttggctcaattatcgttcctgctgcatctgttgcataattaatcgcatccctagttggaaaactataatgcgaattcttcactaaactaatctgatgtacaactgcaatttttcttcttaaaaaagctcgctgattgacccaaccgcctctatgtccgtctaaccaaacatagcaatacttattgccgcgaacttttctaactgcactggcttgaacattgccatgtttaaacgtattagcaaggcatagacttcttgacggacctttacgagttaagttttgataaattctataagacgtatgcggattaatcatcttagtctgaaatggatttagttctcgcgcccaaaccatttgcggcttcaaacataataacgtcatcaaacaagctaatcctaaatagacttttactctcttcattcttatttttacaactccctaaaaataacgcaaagtctattgtaggtcagtgagtttttttatcaatattattattattaatttttagatcaaaaaagcgtaaaggacaataattcatcctttacgctacaatttttattaactttttctagttttgaacaattaagttcttcaaatcatctgataattgaactggtgcgtacttaacacttactactttaatagtagaggtctttaagtatctcttcttaccaatataagcatatctgctcttaccgtttttaacgatcatcgatgacttgtacttcttaccgtacttgatcttcttcttggttgccttaaagtaaacctttttagccttagcactcttcttatatgcgtagtagatctttgcacccttttttgacttaggtgaaacaacgatgtactttaatgctctattgttgtaagcatcttgaatggcttttttgtcactttgtgcttgctttgaccagtctgcttgacttggaactgttgctgaaggggtaacatcagtcgaaacaacataaattgcacattgttgtccatctacagtttgactgtcaacataatagaaagtaacagaaccttgatcgttcttagcctcgttagaaaagtaaagctggatggtttgacctttagtataatttgaatccattgactttacgattttaccatcttggtttacagcgtaaagcttaggattagcattattaactgtagctgatactgatctacgcttaatactaatggtaccttttttgcttgaagtttgtgtagttgctgcatgaactggttctgcagcagacacacctgcaccagctaaaccagctgaaagcatcactgcggcagctaatgaagtaaataaattcttagttttcatcgatataatctcctaacgtaatctcttatagttaaattataacattttttattattcgtcaaggtaaagatacgttccccatttcaccggctcttgtttacttggctgaattgcaaaatacagaacaaaaatccaacctaacggtatcagcattaacagaatccaccaacctgtataattgatatcatgcaatcttcttacggctaggcctaattggcataatttcaaataaagatagatcaagccccaaataatcataccgataatgacaatcatcgaagcgtgatcaccattaaaagcaaaaccatttatcatatcagctgaatcattctcatagtgagaaactggcataacagttgccaaaaatgtaataattccaccaatccaaattataacttcagtaataacgattccaatccagaaacttcttctggtagttcttgcattccagataaatggtcgcagaaaagtttctttcataatttgatcaaaactaaaaactggggcctcaccatctaactttctttcaccctggtattcttgtttgtaatatggctcgctcatcgcttattttcctaattccacataaattttgacagctgctttaatagtttgataaacagttgaaacatgcaaagtatgagctaaaaattcttccttctcggctctagtcattgccgaatcaaagaagaccttgatcttcatctcagttactactgatttaccatgaccgagattctccgtttttgcctggttttctaccctaaaatttttaacatcaagttgatgtgctttagtaatcatccctgccgacattacaatacatgaattaacactactacatagatactcaactgggttgggacctgcatcatgtttaacatcatcacaaacaaaaacatgatcacgtacttggttggcaatttgccattctttatcttctaacttagatttaactacatattcgctcatattttccctctaatgatggtcaattgcgccattcaaacgcttacgccaaatgaaataaactactaaaatcaatggaactaagactaattctactggatagaaccattctatcggtaaagcagaatcaattacaccactgatcattgggccaaaggccatcgcaatgtctagtccaaaataaaaggtagcactagctaagccttgttcttcaatcggtgctaacaacagcgcagttgattgcaaaactgaataaatgatcccatagcctgatgccattaaatctgccgctaaagccatttgccaatcattattcattattgcgagcaagataatataagcagccgttgaaactagacttagccaaaaccagacgccaaaacgtactgtatcaaaatacctttttagtcctactctaataatcaacaaaacaaccgcatagatcaagaaatatgacccaactgcgacagtcagatgtttttgttctacataagttacaatatctgcctgtgttacaaaatacgggatagcaaataaagttgtcaaaattgctaccggtaaaacattaaactggataattttgaaactcttcttctgcgttcgaactcgctttttaggcaaagcatgatcacccacaaactgaatggccacaatcattaataaagcagaaacagctgatgctagcaagcttgtgcgataacctattttttgataaatattaattgaaactgctggtgctaacgccattgccaaagcattcattaagccataaaagcccattgcttcaccaacgtgttggcgcggcactaaaaaagcaagccaggtagtcatacaaactgtgcacaggacataaccggtgccgttaattaacctaaagagcaaaagccaaccacttgacggagtcaaaacgtagcccattactcctacaaaaattaaagcgccgccaataaacgataagcggtatttagaaaatttatcggttaaattgccagctaccggtcgcaaaaacattgctgctaaactcataatcccgacaatgattccagcaaaagcactgctagcgcctaattctttagcatatccattaatcaaaggattaacaaacattgtactaaacataaaaaagaaagatgctgccataaccaggacaacatctttggtataaattgattttctcttcgccaaaatgatcccccaattctgttctaattatacaactatcacagaatgatcatttagcaatttttaaactaacagtaaaaacaatgtcttcacctttgtggtgggctaaaattttgccatgaaaggcttcgactaactcttgcgccatagccaggccaatcccaaagccacctttcttagaattatgcgactcatcatcgcgataaaaacgatcaaagaaatggctgtaatctttgcctttaccttcacgataggtattttctacccgcaagaccgcatatttgcttaaagttccgcccttagtcagtttcacctgaatcttgccatgaggatcacaatatttttgcgcattatctagcaaaatattaactacttcggctaaagtatgcttttcagctaaaacatttaagccttcccgcaccgatacttggtagactaagtcattcttcttcatgactgatttaaaatctttagtcgtttcttcaacgatttctgaaaagctaactttgcttaaggtaagctcacccgtctcgccagctcgagccagcgaaatcaaccgattgattaacttagttagtttagccacctgctctttattgctttcattccattcagaattattgcccagcatttcttccatttccgtattcgcggaaataactgctagtggcgtttttaattcatgaccggcattggtaataaattcctgctgcttgtgataagcatcaatcgttggcttaattgccttgcccgaaactaaaatcaaaactaaagcaaagacaatcaaagcgcctaagcctaaaactaacgctactctaaataataaccaaaaacggttaaaaatcagagtttcattcaaaaaaacaatcatcatttcaccagtagaattttttacaaccctaaaggcatattgattttgtcctaaggcaactacaccacttttatcaccattttctaaagctgatctggtaatagtctgtatcttggaattattaattttataaacgttattatcattaattacatgtacctgatggctttcatcaattgttaccgcaaaatagcgatactgataaaccgcttcgggattatactgcccacctaaaaaattgcgattaattggatcatgttgatcgccaaaggctggtttggcattttttggtgacaagcgcccttcatttttgaccaaagccgttagcacgcgatcgacttcattttggctttgaacatgagtcacccaaactaagccgcctaacgtcaacaacaaaactacaaacaaggcagcaacagaagtaccaataaacttccaccgaaatttttgaatcatctgctcacctacttaactagcttatatgaaccacctttatcgccttcaattcgaactgagctttgaattgattgcaatttttgccgcaagtatgaaacatagatccagactacctcgctattggcatcaagatcatttttccaaacatgattaagcaattcttccgttgataattccttattttgatttaataaaaaataatcctgaattgtcaaattaagtgcaacagttaggctatgaaggaacgtattgcttgaagagttcttctgctgtgtgatattggaggattcgacgatgtttgcggttaatggcatcagttgcctgttgaacataagcagctgacttatctttcatgcttttgcccttagggaagaattgacgcagaagtccattgcagttctcatttgtgcctctttcccaaggagaatatggatgagcaaagtagatctgacatcctttgattttggtcatatccgcaaactcagaaccattgtcaaacgtaattgatttaaaccaattaggatgtctgtcaatctccttttgaagcagtctttgacaagtactggcccgatagtcaggaattttgataacaacctcaaaacgagtggttctttcagtcagtgtcattaaggcaggttgatttttacgtctgacgcctttaaccaaatcgccttcccagtgcagggaaacttttctgttttcaacttctttaggccgctgttcaatcgaattgccaagattctttttatgcggagcatggccaccatgactatgatggcgtttgtttcggcgtcttttaagcttcattggcaggtcgatattgcttatatccagcaatccttgatcaatataacgatagacagtgggcgtgctaggacatggataatttggcataatcctgtgaaattcaccaacgaattcatcaatgctggtggcatcaaatttggctttaaagcgtctgcttagcattctgaaaaagacggcatagtgttgcagtggattacacttatagcagtttctgcggcgcttttcatgataaatttgtgcagtatcagcgtaatagtgctcatacaagacatagctgctgtctctttgcaggacactgcctcgtctaatttcacggctgatagttgatttatgacagcctacttcttgagcgatagcagtgcaggaggttatgccagaatcaagcagagcttgaatttgtccacgttgttcgctgttcaattgatgataatgcttggaaatgctagaatttgagttggtcatgaagatcttcctttcttgatttttggtcacttcaagtttaggtcttcatggcctttttgtttaacaattagtgttgcacttcaattttaaatccgggatcctttttattctgaattatttgaatatctagccttttatttacaggaaaaaggatacgattgtattcttcatctagatcactatcaatcccaagatattaattactatttagagcgatttaaacaaaaggaaatcgctggactgatcaccagctctcctattaagattcctaaaaaaggactaaaaataaagtttcctattgttagctttgaccgtaaaattagtcctcaaataccaactgttcaatctaataactatgacgcaggtatgcaaatcgcacaatctgttctaaaacaaaagaaaaagaaaattattattattgctggtgctaaagaagactattacccaataagtgatcgaatcaaaggaatgattcgcgtatttaacacttttgattctaaattcgatcttcgctcactcagtgccagtgactcaattattgctaaaaaaatagccatccttcaatttttaaaggatgacaaatatgatgcaatttgttgtaccgatgacattacagctttactagctaaagaatgtgctgattatttaggaaaagtacctttaatcacaggatttgatggtagtcatttgattcaaagtctttttccaaatttaattagtgctcggcaacatacaaaagaaattgctgaattaatgtgcgatttacttttacgtcaaattaatgatccctctgtttcattagaaagtgtttatacgctacctgttagtttaataaatcaaaattaaaatcaaaaaaacgctagaatgtagcgatctaataatcatacattccagcgtctttttataacatcttatgctttttcattctctgttcgaaaatcccgttaatcaactctgtcatttgttgtttttcttctgcggttggttcaccatcttcaaaagccttgtataaatcgggatgttctctagcgattaacttgcaagtgccttcaacagcatgcttgcgaaaaatttttggaatcttgtttagatattcttccttgactaaagcaataatcttttcgtttgtcatcatttttactatacctttcagttgatttctaaatattttaaatattaatatggatttacttgtaaaatcaaatcataatatccaaagaaggaaacatccctaccaattcattcagtaaggatgttctccatatttttattcaaatttccaatcaacagtccgcttaaatttttcacctggcaaaagcgtgatgcgtcccaaatcatcaccttctgctggcggcacttgtgcttcaaaagtaatcccgcaatacggaccaaagtcagctgtatacttgccagtgtggtcaaagccattaccagtgtacagaatcagagatggcgcattagtcgttaccgttaacttgtgtttagcagaagttagcactgcagttggcatattgccatccaagataaatggatgatccattccatcgcggttcttaatttgcggatcatcagcttccaatgcatccccaactcgcttcttctttctaaaatcgaatgctgttccatcagctttttccataccacgatcaggcaagccagtctcatcaactggaatataataatcagcattcatttgcagttgcaagtcattaatcattttcttttcacctaatgtgaagaaagtatggttaaccggattaaaaatagtcagcttatcactcatggcacccaatgaataatgcagaatattgttattatctaactcataacgagcgtgtaattttaaattaccaggataagcattatgcccatctggatcaaaaagtgttaaatcaacacgagcacctttttcattacaactaggtctaaaattccaaatttcagtatcagtcccaataccaccatgaatgtggttaggcccttcattgattggtaattgatgtaattctaagccgtgccgccataaacctcgtctcactcttccggcaatacgtccaaccgtaccgcctagataattacgctccttgtcgtaatcttctggcttatccagtgacaaaatcatattctcaccatcaagcaacaccttttccaatgtagcaccatagttcaataccttaactaccataccgtgatcattctctagtgtgatttcacaaagatctttattatcttttctgccatattttctaaaacttgtcttcatactcttgcccttcttttgtattcgctttcataaatattataaattatttaaccatcagaatatatgagttaccgctaacaaaaaaacgagatcaaacagatctcgttttaaacattgatgagttaaatctgcttagttaaagcggtaatgaacttatcccagccttcatcgccatctgcattattcttgaaaacaccagcatcttgcaatacttgttcaaagacttcaactaaagcttgctgcatcacagcgtcaacattctcggcagtaatattctgctctgctttaatttgatcggcccattctttgtggctaatagccatcttattatcttggcccaaccagtattttttaacttcttcaagttcactctttaaccgacctggcaaaatagcacggcccattacttcgatcaagccaatattttcctttttaatatgccacaattctttatgtgggtggaaaatacctaacggataattttcactagtgttgttgtcacgcaaaactagatcaagtacgaagttcttgccttcacggtgcataattggagtcacagtatgatgacgtgttttaccatcaaaagccttaatttgacgagcagaatctgaataatgatcccagaaattaataattttagcgcccaattcaatcaaatctaacgaattatcgctaatcaagcgcaagtcgctcattggccaatcaacaatgccagcaaccacttcaggataatcatcaaagactacatttttcttaatcttagctttcatcattggaaaagtatgacgtccgccttgatagtgttcatgtgctaacattgacccaccaacaattggcaagtcagcatttgaaccaacaaaataatgtggtaacgtcttttcaatttcaaccaaattaatcaaagtttgttggttgatgaccattggaatatgcttttgatctaagaaaatacaatgttcattgaagtaagcatatggtgaatactgaaatccccaagggcggccaccaatattcatgcgaataattctcaaatttgaacgagcatttttgccatatccaccaaggtaaccctcgttttctaggcaaagtgcacattgaggatatttcttaccagttgcatgagctgctgccgcaattgccttaggatccttttccggtttggacaaattaattgtaatttctaagccatgtcctttagagctggtccctgagaatacaacattcttggcaattgcttcctttttgacataattgttgttttcgcaaagtttataaaaccaatctgttgctttttcaggtgatttttgcattttttgccaaaagatgccattagttttagatggtgttggcgttatcaagtcgtatagttgatcattcaaaacttcacgtgaagtaacatcatccgaaatctttttattttgcacggctaaatcaactaattgcttaactgaagtttgttcatcattagcttcaacgctacttgcctcatcgccaactaaagcgcgaattttgttaatcacatatacgcgatcgagcggctcatacgctccactattaataacttcatccgcaaatttttcaataactttcatacttatcctcttgtctgattaaattctcttagttccatcaacaatttccgcatcatagaagctggcatcgtaaccgatcttgtcgcggtaaatcttgccaacatttttcttaaatgcctcagcttggtctttcttgacgattgcaatggcactaccaccgaagccaccgccaatcattcttgcacccaagacgccaggttgagcccatgaagcttcagctaaagtatctagttcttgaccagttacttcataatcgtaatgaagtgaaacgtgtgaagcatcaatcaaacgtcccaatttttccaaatctccattttgcatggcctttgttgcccgcaaagttctttggttttcactaacagcatgacgagcacgcttaatttcagtttcattattaatcagatatgcatattcatcaaaagtatcattatcaagctcacctaaagtcttaatatctaacttagcctgcaacttcttcactgcatcatgacattcacgaacacgatcattataagcagaatcggctaaggtatgtggcttgttagttgccataataataatttcgtaatcgcctaaagcgagtggcttatactcataatctaatgtattgcaatcgaggaagatagcactatcttttttacccataatgcaggcaaattgatccataatccctgaattcaagccaacaaattcattctctgttctttgacccatcttggctaaagcaatccggtcaacatctaagttaaattcatcctttaaaatgatgcccattagcatttcaatggcagcacttgatgatagccctgaacctgatggtaaattggctttgatataaagattaaaaccatgatcaatgttgtcatatttttcacgtaagtacgtaatcatgcccttgaagtagttagcccaaaagcgatcatctttctcaacagttgtgtcgtcaatatcgaattccacgatatcgccatcaacattgccagaaaacaagcaaacttttttatcctctcttgggccgtaaacaccataaacacccaaactaattgcagctgggaaaacatgaccaccattgtagtcagtgtgttcaccgatcacgttgattcgaccaggtgagaaaaagacatccttacctttttcaccaaaagttgtctcatattctttaagtaattcttccttattcattgtttttacctcaaatttattctgtaatcgttttcagttattagtatatctcttcattatcttttagtaaatagtttacttaaataaataaaatatttatttaagtaaaaaaacaagaagctagatcgtttgtctaacttcttgtcttcattaaggaaaaaatcatttatttaacaagtatttgtacatcccatgccttcatttgatcatgagcttgctgaccagttaaaatattttgatactctacaaatttttgtggcaattttctttcttcattactcatatttaaaacaaagtataattcttgcccagactgagtaactcgcttagtaacttctaacttatgactgtcgcccaccaatgattcaacgttagctgtcaaaacaatatggttgaatagctgcgtcaacccaatgtgatccaacttagtaccaacataccaggccttaccttgaccatatttattttccgtgactgcagccgttcctgcataaaactcattggagtactttgctaaaacttttgcattttctggatgaatcaagtcacaaaccaaacccgctttataatccttgccatttagtgaaacaattgtcttatgtcctggtacaattgcatcactttcttcaacccaaatacccataacgtcttttaacgggccaggatagccaccaagatagacattatcactattgttaaccattccagacatataggtagtgacaaagttgccaccatttttgacataagcattaatttttttgcttagccctgctttaaccatatataaaacaggagcaactactaaatcatattgactaaaatcatcatcgacactaattacatctgtcggaatattgcgttcataaaattggcgataataatctaagattgattccatataattaaaatcttgactaataccgtcaacgtactcatatgaccagaagttatcccaatcaaatacaatagcagctctagccttagttttagagcctaaaacagttgggccaatcttttttaattttttacccaaatcttctagttcatgaaagaccctcgtgtcggttctttgtgagtgggcaattacggcactatggaacttttctgagccgcctactgcttgttttaattggaaaaactgaaccgtatctgcaccatgagcaactgcttgcaattccgtggctgccatctgccctggtcttttcagcgggctatatggttgccaattgacttgagacggtgcagattccatcaacataaatggctgatgctttaaactacgcattaagtcatacaaaaatgctggtaaatacttaggtgcatcgtaggttgggtaagaatcataagaaataatatcttgatctttagcccatttttgataatcaaccatcttatttggtaaaccatggaaattagtagttacaggagtgttagtatcatactttttaataattgatttttccatctgaaaaagattttgtaaactatcagattgaaaacgtaaataatcaattgataaaccggcaacaatggtttcgctaccttctggtccccaggcgtctcctaactcattaggaacaacaatctgatcccaatcatgaatagtatggctccacacattcatattccaggcctcattcaggttatctagtgtttgatatttactcttgagccaagtacgaaaagcattttgacaattttcacagtagcaattgccgccatattcattattcacatgccaaacagcaatatgaggtttattactatatctttcggcaattttctcgactaatttactagctaaaacttgataattcttactattggggcaaaagttatgtcgtgcgccaaagacatgccgccgtccttgataatcaactcgtgctacatcaggatattttttaaacatccaagctggcatcgcagcagtagaagtagcaagtacaatatcaaaatttgcatcagacaattcttgaataattctatctaattttgaaaaatcatattggccttctcttgactcaagcaaactccaagaaaaaacattaattgtagcagaatttaaatccgcttttttaaaaactttaatatcttctgaccaagtgtcttctggccattgatctgggttatagtccccaccatataaaaaacgttttaactgtgtcattgtaattcctctacttaaattgtacatctaatactttttcaccatgctcaacaatcttaccagcttcaatttcactagattttacaattcgtcctggttgtgtatagaaggtaactacagtgtcctgatagccattcttaagagctaaattacgatcaaactctaacagcaagtcacctttttttaccttttgaccatcatcataataagtttcaaaaccttcaccgcgcaagttaactgtacctaagccgacatgaacaactacttgtaaaccattatttgaaacaatttcaaaagcatgcttagtaccaaaagtgaacctaactacaccatcaaatggagcataaatattgcctgaatctggtttaattgcaaaaccctttcctgggaatggcttaccatcttcgtcaattacttctgccatcttcattaacttaccgtctgcaggagcatagatagtctgatcttgaggtctaacttgagtattagattcattcttttcaatcttaccttctgcaagttgatcttttaattcttcaaccacttcggcatgtttcttttcagataaagttaccttagtcaaaaagactacgattgataagactgccaaagcaagtgggatatataatgccaccatattaaaggtgctaatatcatgagcagtcatgtctgcagcagttgcagaaccggtcatcccagcagcaattgcaatataaccaactaaagcattagaaaccgcaccggtaaacttatcaatcatcggccgaacagctaaaacaacagcttcatttctttgaccattcttaagttgtccatattcaattgcgtcagttaatgttaaaacagttaccaattgagcaaagttaatgtttaaaagaaccaagcccaagtccatcaaaaatacgttgtctctgccgaaaataaacaaaacataagctaaaaccatgcaagtttgtccagcgatgaataaccattttcttggaatgtatttgttcagaattgggaacattggactaatacagaaaccgataattgttgcaataacaccaactacccagaagtcatttggcttaccaataacgaatttatacatatagaacaaaacaccattggtaattacatatgctaatgagtaaagcaagtatgctaaacttggccataaaatctgatcgttatggaaaatagcaccgaatacttgacgtaaagtagtcttttgcttagctgagtttctaataatattatgcttttctttagtaccgaaacaaacaatcaaggcacatacaattgccaaagctgaaattactgccgcaaatgctaaccaacctggtgcaccttcctcatgtttaccagttaccgcataagtcacagctgtaactaatggaacaacaataattgttaatccgttccaaccaattgttcctgaaaaggcacctaaagaagtataaataccacgtgcatgtgaatcttcacttaaagctggtaccatgccccaataagaaacatcagataatgaataaaatacatcaaaactgatataaattagtacaaataaaatcgcaaagagaatccaacttttttgtgctaatccaaaaatgccagtaaacaaaactaataataaggcggcacttactaaagtaccaattaaaatccaaggtttgaatttgccccatctagttttagtattatcaactatatttcctagaataggatcaattaccaattcagcaattctaattacaaccatcaatcctgtaattaagccgatcagcttatctgcaacggactgattaagtccgctgaacatgctgctagtaataaaaataataaaatatgtactcatcacaccataaaaagccgagtgacctaagttacccaaacagaatgatgcgtaggaaagaatctgcttccctgacttgtcactgtgtgtcataaatttgccccctaaagcaatcattaattgtaatcgtttacacagtttagtatattctctatttttgttaagtaaagaatttatttatatttaataaattctttactgaaagctaaacaaaaagagaacgcattaaattcaatgtcattaagttaagacattgacaaattgaatctaatctctgtagaaccgaatcattatgatttggttctttttttgcataaaataaaggcgaaaagaacctaccttttcgccctctgattaaattattaaaccttcaaaattattgccagaaagctggtgttaattatgaaagcccttcacagaaatattttagatcgtcttgatcaaattatcaatgatactggaaagcatattcatgattttatcgatgatcctcatgccttcactaggaagcggtttttagatgcagctacagtcattaaaactactattaatatgcaaggaaaagatttgaccagtgagttgtttagagcttttggccaaaaagctattaaaaataacgataaagtagtcagtacttccgcttatgtccaacgcaaaggtcagctttcacccgcatgttttaagcatattctaactgtatttaatcagaatttatttaatatccagttatttgatcataaatatcgtatatttgccattgatgggtctgattttaatcaaatctggaatcctaaatcagagaatatcgttggaaatctcaatcataaaggaaagccatattgccaaattcatgttaatgcactctatgacctgttaaataatacttatcaagactgcatctttcagcctaagtcaaagatggatgaacgtaaagccgccgttcaaatgcttaaaaagctaaattgcggaccatatatagttactatggatcgaggttataccggctttaacatgattgaaaattgtaatcgcctgcctaactgttattatgtcatacgtactaaaacgggatatggcgcatttaaggaagtagctgagttgcctaatcaagagtgtgataaggatatagcttgctgggtgactacctctaattattattatgaaacccataaggctacagaaaacgttcatttggttaaccatcattaccgtcaatatataaaatatcggtctaaaaataccaaagatggcagctgggactttggagagttatgtacaataaaatttcgtgcctgtaaatttagaattaatgatcctaaatcaggcaaagaagaatgggaagttgttctaactaatctaaatagagccgattatcccttaaaaaggatcaaagaaatctaccatttgcgctggggcattgaaacttcattcaaaaagttgaaatatgctttaggtagcgtacagtttcattccaagcaggatagatttattgaaatggagatctatgcccacatgattatgtttaacgcagtcagtcaaattgatgctcaagcatatgtaccacaaaaaaaatgcaagtatcaatatgcgatcaatttcaaacagtcatgttttgtcatccaggctatgtatataatttcttcttcaactgaaatctttaaaaagattcttattcaaattagtcattacacaattccgatcagaccaggacgaaaagacaaaagaaatctcaaacccaaatcagctgtatattatttatatcgtgtagcctaatttctaaacaagatttgggtttatttggcatgaaaaaagagcattcaaatgcgataaatcgcaaatgaatgatcttaaaagtccaagtcgataatttgtcaatgtcttaacttaatgacattggcattaaattagcattctcttttgatagtattactaaaaaatatttttatttactaattaatttacttcttaggcacaaaactcttgcgcacaactaaattagtattcatatttacatcaatgtgtgcccgattaggttgaataatcagattcgttagcatatttaatgccatatcaatcatctcttgttgatcaatattataagaagaaagtggcggtgaaacatacttaaccacattactattattaatacttaaaattgcagtatcttttggcacattaacattgttctcattaaaagcttgcaaaactccaactgccaaagtatccgaagcaattaaaaatgcatcaggcaatttatttttgcatttagccagtacctcttttcccaacttatagccattagcaacgctaaacgggccattaacaaacatcaattcatcacttttgcctctcaccttgatatactccgcaaaagcggtggcacgtacatctacttcttgaatatgatcatgcttaggcccaatgccacctataaaaccaatgcgctgatatcctttatcaagaaaaagatcaattgcattttttactgtcagcgttaaatttgggcgaatggaatcaaataattccggggctggattagtatcgacaaagaccccattaggcaaaacctcatggagtttttttagtgttgcattttcaattggcgccgcgccaactccgataaagccctgaaaaagtgatgcatgtttaatcaaatcatctgcatcataaaaagtcttcatctgcagcgactctgcttctactgttgaaatcagcgcttgctttaatgaagtaaaatattcatcttgcagttgctcttcatgatttactcggtatagtaacgcaattgttggacggatcttcttttcctgatgatccttccaatagcccaatttattggcaatttctaaaatcttgttcttagtatcagccgtaattgacaaattaggatcattatttaataagcgcgaaaccgtagctgaagaataccctgattcttgtgctatttctttaattgttgtcatatttatatcttttctatcttaaataaataatttttaactttattatacaaaatatttacgtaattccaataaatatcataagcactttgtcattcgttttcgagtcaaaaatattaatcttcaaaatatttttcagtaaataatttacttattaagtaaatttattatctatgtgttataatataagcgttttcaaggttaatttttttatagaaatcaggtattttcatgaaagcaaatcttagctggcttgatgaccccgaagttttccgcgttaatcaagttcctgcccacagcgatcatccctatttcaagaactatcgcgaatggcaaaagcaaactagtagttttgttcaaagtttaaatggtgactggtgttttaagttttcagctaatccacaaacacgacccgttgatttctttaaaacagatttcgattcttcatcatttgatcacattccagtcccaagtgaaattgagctaaataattacgctcaaaatcaatatattaatacgctctttccgtgggaaggaaaaatttatcgtcgacctgcttacacaatcaaccaaaaagctaccgactcttttagcaaaggtgcagataacacagttggctcttacattaagcattttgacttaaattccactttgcgaggtcgtaatgttcacattgtttttgaaggagttgagcgagcaatgtatgtttggctcaatggtcattttgttggttacgccgaagatagtttcactccttcagaatttgatctaacaccttacattaaaaacaaaaacaatattttagcagttgaagttttcaaacatagcactgcctctttcttggaagaccaggatatgttccgtttttctggcatttttcgttcagttgaattgctcggcctacctgagacgcatttaaccgatctcgatttaaaaccagaagttacaaataattaccaagatggaatctttaatgctcaattgcactttacaggcaaaaatactggctcagttcacttgttcgtagaagatattaatggcaaaactctacttgagaaaaaagcaccaatcagcttaaccataaaaattgaaaaagaattattcaaaaatgtgcatctttgggataaccatgacccatatttgtaccaactaattattgaagttcacgctgaaaatggtgatttacttgaactaattccttaccaattcggctttagaaaaatcgaaattaattctgacaaggttgttttattaaatggtcaacgtctaattattaatggggtcaatcggcatgaatggaatatgaagcgtggccgcagcatcactttaactgatatgaaacaagatatacatgcttttaaagaaaataacatcaatgcggttagaacttgccattatcctaatcagattccgtggtactatctctgcgatcaaaatggaatctatgtcatggctgaaaataatctcgaatcacatggtacttggcaaaagatgggacaagttgaaccttcagataatgttcccggttctattcctgaatggcgtgaagctgtaattgaccgtgcccgcaacaattatgaaactttaaaaaaccataccgccattctcttctggtctcttggcaatgaatcatatgccggagaaaacattgcggctatgaataaattttataaagcacacgatcatagtcgcctgacccactatgaaggcgtggttcatacgccagaattaaaggacaagatttctgatcttgaaagctggatgtatttaccaccaaaagatgttgaagaatatcttaaaaataagcctcaaaagccatttttagaatgcgaatatatgcatgatatgggtaattctgatggtggcatgggttcctacattaaattgcttgaccaatacccacaatatttaggcggctttatttgggacttcatcgaccaagcgctattagtacacgatccggtgagtggccaagaagtattacggtatggcggcgactttgacgaccgacactctgattatgaattttcaggcgatggcttaatgttcgccgatcgtacaccaaaaccagcaatgcaggaggttaaatactactatggcttacacaaataatttacatataatctatggggatgctactttaggcattaataccccagataagcaatatattttcagctatgaaaaaggtggcttagagtctttaaaaattaagggtaaagaatggttttatcgcgttcctaccccaaccttttggcgtgcaactactgataacgatcgcggcaacggtttcaacttaaaagcagctcaatggctcggcgccgatatgtttagccactgtactgaaattcagctcaaagttgatcaacatgattttgcagatttgccaatcgctccactcaacaaccaattttctaatcatgagtacgcaagtaaagtcgaaattacttttatttatgaaactttaactattccaaaaacaaaagttgaaattacttaccaaattaacaataatggtcatgttataattaagatgcgttattttggtaaaaaagatttaccaccgcttccagtaattggaatgcgctttatcataccaactctagctagtggctttgaatatgaaggcttatctggtgagacttatcctgatcggatggctggagccagtgctggctcttttaaaattaagggattgccagtaaccaaatacctagtgccacaggaaaatgggatgcacatgcaaacgcatcaactcaaaatcactagaaatactacgctcaacaatgctgatcattctaatgaggattttgacctcaccgttgagcaaactgataagccattcaacttcagttgccttccctacacagcagaagaactagaaaatgcaacgcatattgaagaattgcctcttgcccggagaacagttttagtaatcgcaggtgccgttcgcggtgtaggtggcatcgatagctggggtacagatgttgaagatcaatatcaaatcgacccaagtcaagatcatgaattttcatttagactaaattagtgtttttaaataatttatctaaaataagtaaattatttactaaaatatgtgttataatgtaatcgatttcaataaaagataataactaaaataaaggagcgcaaaacatgaaagttttagttgtcggtggtgcgggttatatcggctcacacgctgtacgcgaattagttaaagaaggcaatgatgttgttgtcttagatgctttatatactggtcacagaaaggctgtagatcctaaggctaagttttaccaaggcgatattgaagatacttttttggtaagcaaaattttacgtgatgaaaagattgatgctgtaatgcactttgcagcatattcattagttccagagtcagttaaaaagccacttaagtactatgacaataacgttactggcatgatttcattattacaagctatgaatgacgctggtgttaaatacttagtcttctcttcaagtgctgcaacttatggtattcctaagaaattgccaatcaccgaagacaccccacttgatccaatcaacccatatggtgaaaccaagatgatgatggaaaagatcatggcttgggctgataaagctgatggtattaagtacactgctcttcgctacttcaacgttgctggtgctgcaagtgatggcacaatcggtgaagatcacgcaccagaaacacacttgattccaaatattttgaagagtgcaatttctggggatggtaagtttactatctttggtgatgactatgacactaaggacggtaccaacgttcgtgactacgttcaagttgaagatttaattgatgctcatattttggcactgaaacatatgatggagactaataagtcagatgtctttaacttgggtactgctcaaggttactccaaccttgaaattttgaacgctgctaaaaaagtaacagggattgatattccttacacaatgggtccacgtcgtggcggtgaccctgactctttggttgctgattcaaccaaagcaagaactattttgggctggaagccaaagcatgaaagtgttgatgacgttatcgcaactgcttggaactggcacaagagtcacccaaagggctacgaagacaagtaaagtataataaagatttctataaaaactaatcgtttttcaaactattttctacatctattatctaaaaaaatgacgctggttcgatcaactagcgtcatttttgattgaaattatttttcaaactctaatttagttagccaagtttgaactgcctgaataacttgagtaaaagtgattcccttagcaaaaggatgttttctcacgtatctattccaaagattctgcatattactattttcagcaataatatctacttgtcttagacaatacttataatctatatcttgtcctgtccaaaagattgattcacggtaattcgtagtattagcaaaagctgactttaaagtagctaaattgattcgttctctctgcagtatgaataaatcatagagatctttcatacgtgtattagctattcctctcgtaattaccgtttctaatttttccgctactatagtttccatagtatatgcccaaatattaatatgtcgatcttctaaatgtaatttatagctatattcaatctccctaggtgtaataacatcccctgttgaaacatctacttttaatggatatcttatcttccgaaaagaagcattaaaatgtaatcgatagcccttgtactcttcatgctcatgaatctgttcaatttctgacaacgaaatgcttaatagatcccccgctaattttatttgacagatttcttcaaatactttagctatttgtttttcggtcaaatctaatccttttatctcagcatcaatgtcttccgtggatcttttatcgataccaacaatagccgacaacaaaaaaccaccttttaaaatgaaattatctcgatattttgatactgaaattctttctagcaaatcatctaacataatttcttgccataatcgaccaatctcatttccttttatattatgctctctagcataccttcttacatctgctttgaactgcttctcatcaacataatttttcacaacaacacctctaagtagctatttacctttctagttaccctaaacttttctgcaaaagacattaatgtatttatgtcttttttcttttccttattccacatcttgaaggcattggtaattatttcgatatctacagcattaatcggtcgcaatatttcagctagagttctttcaggagtatagagattaatcacatttccattgaatgattcagtttgagttattccctgagtagccaaacttttagtttgaatatgtggatttatttcaatatccaaagttggattattgtagcccctaggaaaagtcatatctaagctaaaaggatattgatcacttaacccccataaatataatgctgtttctaaagaatagattccttttttatatttttgttgcaaactataaaatatatcctcggtatcatcaccaaataaataaattcccggacgtattttttctaacgtaccatcctgaacagctttcgaaatactataacttgatactccatttaatgctaattcacgatgagtaattgtaccgttatgtatttttgctagttgactaatcaatgatttttgtttcataagtactgtcaatatacgaatatggaattatattacctacaattgaaaaatatatttctcctttcattatttcgaacataagtttaatgaattacaaatataaaaacaagcgaacaaattattaagattttattatttccatattcttctttttcaattgcttttttacttattttactacactttactatgtagtgtagtaaaataagtaaatttagtgtccataaagtaagtaacattgattcaatatgacttactttatggacactaaactattatcctcaagtttggtatacaccagtttcttgctaaaagttgtataatgtaaacagtaaacaaacaaggagcatctttatggcaagtattagagacattgcacgtattgctggggtatcgccagctagcgtatcacgaattttaaacaatgatccaacttttagaatcaatgaggctagtcgtgcccgcgttatcgaaaccgccaaacgcctgcattattcgaaatctcaaaaacatcctggtcccaagcaaactgataaccagctctcgattgcactaatcatgcgttataacaaatctcgtgaaatcaccgatccctattttctcaatctgcataaaggcattaatgaagaagccaagaaatggcatttacgtattgagcaaccttttagaatagaagatgataataaaaattgggctgacttagctaaatttggcgcagtgctaatcgagggtgaaatgacacctgtagcaattaagcagattcaaagcattaatccccatataatttttatcgacgtcaacaccaatattcataattgtaatatcgttcgtaatgattttgtggaagaaacttctcatattcttgataccctctataacctgggacacaagaacattgtttacatcggtggaaaatcattggttcttgatcttgacggtaagattgcttgtgaaaaaaatgatctacgtgaactcacttacttgtcctggatgaaactccacaatcttgaccagtactgccattcttttattactgattggtcaactaactctgcttttgaagctggaaaagagatcttaaaactgcaacaacgtcctactgctgttgttgtcggtagtgatcctatggcattaggtgtttataaagcctttagtgatgcaggtgttaacatccctgacgatatctctgttgttagttttgatgatgtagatatcaatcgcttcttaactcctaccctatccagtgtctatatgaatactgaagaaatgggcaagactgccgttcgtttggctaaagatctaattacggaagatattcaaattccacttacgatcacttgccatagtcaattaaatatccgtgactctatttctaagaaaaaataatataaaagaaaagcctcgaaagcactgtacgagactgtaaaatagtttgtgtaaggatgaatgattccttaaatttatttctttaaacattagaaaaaggagttcctttctcgtatgattggtttgaacaaaaaaacacatacagaaagaagaactccttcatgaatgattttaccaaagattttgctcaagctctattcaatccagacaaaataaatgatttattgcgcaaagagctacaacaggctgttaataacttgttagaagctgaattgactgcctttctgggctatgatccctatgccagaaatggctggaatactggcaactctagaaatggtgcttatttccgcaaagttgatacgcaatttggcccaattgaagtgcaagtgcctcgggatcgcaacggtcaatttcatcagcacacgctgcctgactacaagcagcactcggatatcttggaaagcatgattatcaagctttactccaagggcgtgaccaccagggaaatagccgatctaattgaaaagatgtatggcagccattacagtccagctcaggtatcaaatatttccaagcagatgattccaaaggttgaggcttaccacaaacgcaagctaagcgacaagtttttctgcgtctatttggatgcgacataccttcctttgcgccgagaaacatttgagcgtgaagcagtctatattgccattggcatcaagcctaatgggcacaaggaggtcattgactactgcattgcgcctagcgagaacattgaagtctggacagatatgcttcaaaacatgaaatcccgaggcttaaagcaagttgagctttttctttctgatggtgttgttggcatgaaaacagccttggccaggacttatcctaaagctcattttcaacgctgtttggttcatgtcatgcgcaatatctgcgctaaagtacgcgtcgacgatcgtgaaaagatcatgaacgaattcaaacaggtgcatcaacagacaaacaaagaagaagccacagctgtcctgcatgacttctataccaaatggggcaaggtttacagccatgttatcagaagcttgaaagacatagaaccagatctgctggtcttttataactatcccaagcagatcagagcttcaatttattcgactaacatgattgaatcatttaacaatgtgatcaagcgcaaagctaagcctaaggcagagtttccaactgaacagtcgcttgatgcttttattggcattcaggcaatgagctacaatgaccgttatttcaatcgaattcataaaggctttggtcaggttcaggacaccttagaatcctactttgattaaataaataattaaaaaatcaatttacgagaaagatctatttacacaaaagatttgacagttcactgtactgagacgtaaaaagtagacaattaaaatattggattaatagaggcttgacttcgatactctttcggggttaagccttttaatctgctctttatcctttcgttgttatagtattcgatatattcctcgattgcttgagttaattcttgaagattatgatacttgtattcttgatcatagaacatttcagttttgagcaggccaaagaagttctccattagcccatcatccatggagttgccctttctggacatgctttgagtaataccatggagttttaaagctcgctgataacgagggctttgatactgacagccctgatcagtatcaaaaatgcagttattaagagctgtttctttggcaaaagccttgtcaagcattgtcattactaaatctatatctggatgtttggagatagtataagaaactatatcgccaccgcagccgtctagaataggcgataaataaagcttttcattattaagatgaaattcagtgatatcagtataccattttgtgttaggcagggctgcgaagaaatcacgatgaattaaatttggagctattttgccaatagtacctttatagcttgaatatttgcgcttattgcgcctgatgcctttaagacctaatttatgcatccaatagcgaacggttttctccgtaactttccagccctctctgattaactgcaaagctactctgcgatatccatagcggccttgatgatgattaaaaatctcatggattctagcaataagctttgaccgtttaggcttgacgggctgtcgtttgataatcttgtagtatgagcttctggcaattataggtagctcagggtgctctgcaatcgcagctaatacataatttaaactaactttgaattcttgccttagatccgtaatcaccctagctatttcttctgatcttcttgatccaaggcacttagtttttttacgtattcgttcacaatacgcaatcgcaagttttcttctttcagctgctggatctctttctccagttccttgcgagatttctgcttttctttggtcacgggcagggcgtcctttctgtttgataatgacattatacccgtttttcttatattctctaatccaattgttaagcatgccaatacttttaaaccccagttccaaaggcagctgtaagtatggtttattgccaaagattgcttgttcaatagttcgctgcttaaactctttggagagactgtaaaatagtttgtgtaaggatgaatgattccttaaatttatttctttaaacattagaaaaaggagttcctttctcgtatgattggtttgaacaaaaaaacacatacagaaagaagaactccttcatgaatgattttaccaaagattttgctcaagctctattcaatccagacaaaataaatgatttattgcgcaaagagctacaacaggctgttaataacttgctagaagctgagttgactgcctttctaggctatgatccctatgccagaaatggctggaatactggcaattctagaaatggtgcttatttccgcaaggttgatacccagtttggaccaattgaagtgcaagtgcctcgagaccgcaacggtcagtttcatcagcacacgctgcctgactacaagcagcactctgatgttttggaaagcacgattatcaagctctactccaaaggcgtaactaccagagaaatcgctgacttgattgagaaaatgtatggcagtcattatagtccagctcaagtatcaaatatttccaagcagatgctccccaaggttgaggcttatcacaagcgcaagctaagcgacaagtttttctgtgtctatttggatgcgacataccttcctttgcgccgagaaacgtttgagcgtgaagcagtatatattgccattggcattaaacctaatggacataaggaagtcattgactactgcattgctcctagtgagaacattgaagtctggacagagatgcttcaaaacatgaagtccagaggcttgaagcaagttgaactctttctttctgatggtgttgttggcatgaaaacagccttggccaggacttatcctaaagctcattttcaacgctgcctggttcatgtcatgcgcaatatctgtgctaaagtccgggtggatgaccgcgaaaagatcatgaacgaattcaagcagatacatcaacagacaagccaaaaagaagctgcagctgtcttgcacaaattctatgccagatggaataaagcttatagcaatgtcatcaaaggtttgaaggaaattgagcccgatctgctggtcttctacaattatcccaaacaaatcagagcttcaatttattcaaccaatatgattgaatcctttaacaacgtcatcaagcgtaaagctaagcctaaggcagaatttccaactgaacagtcgcttgatgcatttattggcatccaggcaatgagctacaatgaccgctatttcaaccgaattcataaaggctttggtcaggttcaggataccttagaatcttattttgaataaataattcaaaaatcaatttacgagaaagaactatttacacaaaagatttgacaggttcaataaatctagttcatgagcttgttttgttatactttaaatttaactttgagccattttaattatttaattaacttttctatccagctaaattccaaggaattcctttaatatccttgactattcgtagaaaaccaaaataagcactgatgttaaattcatcagtacttacaattgtagagtccctttgttcaacccgtattgataacgactgcttacaataataaaattaagaccactagaataacagcttatggttttcgcaactttgatcattcccgtatccgaagtctactagctctcaaatctcatggtaaaaactaagctaaaagaaaaggtcagctcaagcagcttcgctacttaaactaacctcatcaaaatacctcatcagtactgacaaagggataaaattgtagagctaatttgattacttacgcttcttgtttacagcagcaaggccaaacattcccaataaggtggaggcacctaagcccattaatgttaagctattgtcattaccagtttgtggtagttggttatccttagctgtcgttggttgagacgtaatcgtccgcttaacagtcttgttcagatctttcttatcaacaccctttggatagttcttgccaggattgtctggaagcttatcgcttggtgtcttcggatcggttggtgttaccgtgatgatcttatgttcaaccttaaccgtaactgtttgaatgccgtctggagtagcggtgatctttgttggaatctttggatcaggaacaatctgccaacctgcaggaacgtttggtgtaactggaatctcttcatccgtctttcctgttaatggggtagtaccaacttctttgccgtttggatcaacgtatgtgatcttcccagtctgttcggttggcgtgtaggtaatttcaatttttggatctgtgtaatcaaccgttacctgatcaactgcagggacttctgcttgacttggagtgtaacctggaatttctggtgcattatacttatcaagctttgaggttgtccatttgccatacgtaacttggcctgtaacctcgtcaacagtagccgtccgagttagagtagtctcttgactagcatcaacagttgagccagctggtttattaacagtaatcgtccgcttaacagtcttgttcagatctttcttatcaacaccctttggatagttcttgccaggattgtctggaagcttatcgcttggtgtcttcggatcggttggtgttaccgtgatgatcttatgttcaaccttaaccgtaactgtttgaatgccgtctggagtagcggtgatctttgttggaatctttggatcaggaacaatctgccaacctgcaggaacgtttggtgtaactggaatctcttcatccgtctttcctgttaatggggtagtaccaacttctttgccgtttggatcaacgtatgtgatcttcccagtctgttcggttggcgtgtaggtaatttcaatttttggatctgtgtaatcaaccgttacctgatcaactgcagggacttctgcttgacttggagtgtaacctggaatttctggtgcattatacttatcaagctttgaggttgtccatttgccatacgtaacttggcctgtaacctcgtcaacagtagccgtccgagttagagtagtctcttgactagcatcaacagttgagccagctggtttattaacagtaatcgtccgcttaacagtcttgttcagatctttcttatcaacaccctttggatagttcttgccaggattgtctggaagcttatcgcttggtgtcttcggatcggttggtgttaccgtgatgatcttatgttcaaccttaaccgtaactgtttgaatgccgtctggagtagcggtgatctttgttggaatctttggatcaggaacaatctgccaacctgcaggaacgtttggtgtaactggaatctcttcatccgtctttcctgttaatggggtagtaccaacttctttgccgtttggatcaacgtatgtgatcttcccagtctgttcggttggcgtgtaggtaatttcaatttttggatctgtgtaatcaaccgttacctgatcaactgcagggacttctgcttgacttggagtgtaacctggaatttctggtgcattatacttatcaagctttgaggttgtccatttgccatacgtaacttggcctgtaacctcgtcaacagtagccgtccgagttagagtagtctcttgactagcatcaacagttgagccagctggtttattaacagtaatcgtccgcttaacagtcttgttcagatctttcttatcaacaccctttggatagttcttgccaggattgtctggaagcttatcgcttggtgtcttcggatcggttggtgttaccgtgatgatcttatgttcaaccttaaccgtaactgtttgaatgccgtctggagtagcggtgatctttgttggaatctttggatcaggaacaatctgccaacctgcaggaacgtttggtgtaactggaatctcttcatccgtctttcctgttaatggggtagtaccaacttctttgccgtttggatcaacgtatgtgatcttcccagtctgttcggttggcgtgtaggtaatttcaatttttggatctgtgtaatcaaccgttacctgatcaactgcagggacttctgcttgacttggagtgtaacctggaatttctggtgcattatacttatcaagctttgaggttgtccatttgccatacgtaacttggcctgtaacctcgtcaacagtagccgtccgagttagagtagtctcttgactagcatcaacagttgagccagctggtttattaacagtaatcgtccgcttaacagtcttgttcagatctttcttatcaacaccctttggatagttcttgccaggattgtctggaagcttatcgcttggtgtcttcggatcggttggtgttaccgtgatgatcttatgttcaaccttaaccgtaatcggggtatagtcgataacaactgtttgtggtgattcagtgtagatgtaaaacttttctttacctaatcctgctccaggagtagtcttttttgcattaatatgataagaatagcctggaatatcaatatcattaatggaaaaagctggtaattctatgctaatatcattcttattaactgatataaatttctcatagttctctttatcctgttgagtaagaaatgtattcttatctacttgaaaaaaagtttttggtaaaacgtttttctccaaaattgatatttttggcaatggattattggatgtatttacttcagcaataacttgaggtttataattataaatactcgatctagtagatgtgtgcgatcgatgctgatgctttctcccttttaagcagctaacattcaaagtcatagttacagtttcaacaccggtaggtttgtttaatattactgttctaattacatcgttattatctgaatttctaaattcaaaactctttactttttttgtatataaagagtaatcaaatctcgacaaatcagcagtcttggaattttccacatttagtgtagaagaatttttagtagaatttgttacttcagttttatccaacatctgattatttactttgcaattttcagtttgcatttgtttagactgaaaagcaccggttggaattttaactttatcatttattatattggtgccattacccgatccggctaattgttgattgttattatccctcaaattcgtatcagccataacataggagttgtccactcccaagtataaggtaatacctatggtaacagaaataagaccaatagataacttacgaagtgaaaaatgatcttgttttggttttaactttaccagacggccgtaataattctttgctgataacatagtatctccctttttatatttactctcagttggaaacattgtataaaaaatcaaccataaacagtattcttaaaagattagaaatcaatccccattacttatatttatataaagtttattccatcctattataatgatatatcattcaaaattccgaagctaattaaagcatcgcgtcttgattagcttcggaatggttggtaggtaatcatattagccttgatgtttattaatgccaagaacagctaagcaactggttaacaggcttacaataatcccggcaacggttgttaagctattgtcattaccagtttgtggtagttggttatccttagctgtcgttggttgaaacgtaatcgtcttcccagtttgcatgttaggaacattaccttctagtttgccagtaacagcatttccattaggagtagtgtttgtaggcgtattagtagctggtgttccttgtccttgatgatcattagttgttggttgaccgccattagttgggatcaaccaacaactaatgatttgattagggttaccatccttgaaggtgtaaaatgttggaacactttcaccaggaactaattgataaccatcaggaatgtgaatattaactggaactgtctgaccagacttgccaggattgtccggaagcttatcgcttggtgtctttggatcagttgttgttgtctctggcgttttgggatcagttggatctgtgtccttagtgtaaacaaaagttgtgatgtactggtatacagtatactggccactcgtcgctccaagagtacgaacaagacgataacctttaattttcttaggttggacttgccatggaccctttgcataccagcctttttgcggattaaccccattatttttttggttaggattatctaggttgaacgcaagcgtatcattattcctaagcacatttccttgctcatcaatgtacctcacagttactggtttgtttggtagcaagtaaacatgtatccccttagcgtaccaattgaaataatcagaattaagatatgtccctgtacttcctatataggagtaaccttgtttttcgtaatggctaatctcctcactcatttttttctcataattaccattgtttaggtcaatcctttcgccatagctaccagcaatcgtaaagagtttgtacggtagatttgtttcttctggaacaagtaacaattcagtcctattactatcagaattattttttataaccttcttatacttgaaagttaaataaacatagttaggatcagctaacgaatttcgagtttgaccagtgattttaccctttaaaacaggttcagaaactaatttatatccaggaatattaatggctgcggcttcatagcgtgatgcatccggtgctttcttatcaccagcacggtgttgtggagattcaggggccatccagaaactatctagaacgattgatgctaaaatatgcccgttatctacatcaacatactctactttgattggtgacaatgatgcgtaatctaaattaatgttaatgtcttgcgtagtaatacctttcttaaggcaggcattaccttgtttatcaaaatagaaatacttattcaaaacttctgaattcattaatttataaccggccacagtaaattcttgatccacactatcccctggtcgaattgtggtctgcttgaaaggttgtttgaatacataatgaccattactaatcacttgaattggcttatgtagggtgacatcgcgaaaattcatagtaatgttgtacttactgggcagtggttgttttgctgtgtttgttgtacttactgggcagtggttgttttgctgtgttttatggattatcggcatttgttgcgctggcgttgttgttttatttggaactaatgttgatgaagtttgatgaacaaccgtatttgattcgtcgctaatccgaatattgcttgaatgggcactaacttgtggatcagtcacttgagtcgtgaatgtattttgagcagcaactgtcgtatctgccttggcattaccactaataatgaaggttaagccaacaaggacagatgccgttccaactgttaatttcttaatggcaaatcgttgtcgttttgctacttgttgcttatgtaatttgtccatattttatatcctctttctaagacgcaatttattacgcgtggtgctagttaaatcgttctaggcaatatgctatattataagccaaaatggctatttctagccgctgctgaaaaccagctaagctccttgcccagttattttcagcgttatagtagctaagcaaagaaaagtcgctctcaattgttcttctaattgccatcagttgatgatcgttatgctttttagcgcctttcatgtttcttcgatatggtgtccaaagcacatagccgtcatcacttactatcgcgtgaaccttgaagccgtaataatagattttcttagtggctttatatccgatatcagatatgccacgaaagatcttgacgcgatagttgcggatgggctgacaaactggaactgggaagctgtcaataattaagaattctccagctgtttttacttcttgattccaatcttgacggatacagcgcattaaaggcaaaagcattcgtgcccgacgattaaagcgagaatgagacaaaccgacaaagaatttacaaaatcttctttgagattcgataccaatttcagtttgccaaataagcattgctaaaatagaactgtctaagagcttaacctgatcaatatttttacggtatttcagctcatcaggagcacaaagcttgtacaaagaacgacaaattacatttagccgagcaaagctaacttgtaaatggtgagaaaaacgattaagcttgagatagttcaattagatcagactcttttctatttaatttaagttacaacttgagtctaatccgattggacttttttattaactaaaacgacttaactagcaccacgcgtaatttattatatattgaatatgtggggggggcaagtgcttttgtgtggaaaccctgctgagttgggtcccaactttcaattttcactggtttaaacagatgtgagaacacaatgttaccaaataaatccgttatggttaggtgaatgatttcatcgctttgccagtctagaccggtagtatcaatccagtaaataaatggggtataacattttaccatttttcaaatcctccagcgcaaaataatatatacttttttaaaactaagctatattattttgctccacctgctttcggatccgttgcaaagttgaaatcgaaatatcaaaagcactcgcagtctgtttgtaggaatgagtaagcaagtactcataagcggcttggtagtgcggggtaatggctctttggggtcgtccttcatgataatcagaccggtgtaacttagcataacgtttcccttattgggtgcggtccacaatcatatcccgttccatttccgccactgctaagagaattgttttaactaatttacccacagttgagttttccaacatgccaatgttaagtacattgatcttcactccttgattcattagtgggtcaataacatttaatgcttcccgggtatttctagctaaccgatccagcttggtaaccgtaatcacatcacccggtttcgccaattgagttagtttagcaaattgtggtcggtcagttgtagttccagtaaatttttcggagaaaatgcaatcctcactgatcccagcagtttgcaattgattaatttgatctgctagttcttgtccctttgtagacaccctagcatagccatattccgtcatttcaatccatcctttttgaccataagtttctgaacatcatttaagcttgatgttgtaggcccagcacgttcattcaaaaagctaaaagtttttgaacaggcttgcatttaatatagtgcgaatggttgagaatctacatagccaagttaaaatttggtgtcggtttagctgacacattttagtcgatgtgcgacaccgttgttgacaccgaatcttgaaatttgaaaagtgtcagttattaactcaaatggtgtcggtctggtgttggttaagttgacactagcagattattgttatatcaagcattgggtagcttttgaattgttttggtgtcaatggagatatgatggataaagctagtagtatcaaggtgttgagaggaaaagtgtcaaaggtgtcaggttttgaccagaactttttaaattaactaattaagaagaaaaataatagtaattaatgtaaaaatgtactgagacgtaaaaagtagacaattaaaatattggattaatagaggcttgacttcgatactctttcggggttaagccttttaatctgctctttatcctttcgttgttatagtattcgatatattcctcgattgcttgagttaattcttgaagattatgatacttgtattcttgatcatagaacatttcagttttgagcaggccaaagaagttctccattagcccatcatccatggagttgccctttctggacatgctttgagtaataccatggagttttaaagctcgctgataacgagggctttgatactgacagccctgatcagtatcaaaaatgcagttattaagagctgtttctttggcaaaagccttgtcaagcattgtcattactaaatctatatctggatgtttggagatagtataagaaactatatcgccaccgcagccgtctagaataggcgataaataaagcttttcattattaagatgaaattcagtgatatcagtataccattttgtgttaggcagggctgcgaagaaatcacgatgaattaaatttggagctattttgccaatagtacctttatagcttgaatatttgcgcttattgcgcctgatgcctttaagacctaatttatgcatccaatagcgaacggttttctccgtaactttccagccctctctgattaactgcaaagctactctgcgatatccatagcggccttgatgatgattaaaaatctcatggattctagcaataagctttgaccgtttaggcttgacgggctgtcgtttgataatcttgtagtatgagcttctggcaattataggtagctcagggtgctctgcaatcgcagctaatacataatttaaactaactttgaattcttgccttagatccgtaatcaccctagctatttcttctgatcttcttgatccaaggcacttagtttttttacgtattcgttcacaatacgcaatcgcaagttttcttctttcagctgctggatctctttctccagttccttgcgagatttctgcttttctttggtcacgggcagggcgtcctttctgtttgataatgacattatacccgtttttcttatattctctaatccaattgttaagcatgccaatacttttaaaccccagttccaaaggcagctgtaagtatggtttattgccaaagattgcttgttcaatagttcgctgcttaaactctttggaatagctttggtttttagtagttaaaatttctattccatgcatatcaattaatctaagcatatagtctaaattagctagattcattctgtacgctttagccaattgactgattgagatattttcatctttccatttatgataaatttctattttttgttctttattaaatttagacatagtaaacattctaagctaaatagtgaattagttatccgacgggataattgattcactatttttattcttttgtagaattaaagtagtagtaaaacgatatgccctgaggtctttagacacttgatgtcgcataataaactggcagttttacttaagttttcaatagtctcttcgaagaatgtggacactagatgtcgagtttagaaaattagatctgatttcttaagtaaatacgttttactactaagttttggaggtttttattatgcaagttacttttggaattgatgtaagcaagtctacttctactgtttgtgaactaattggtgaaagcaaaaatgaactaaccattactaataatcgtcctggttttattcaattgcttcatgaattaaccgctttttctaaacatccgcaaattatttttgaagctaccggtgtttattcacgtacactgcaatcttttctggaagactatggctatgattatgtaattcttaatcctcttaaagctaaaaaagaaatggatatgggactacgtcataataagactgataaaactgatgcttatcatttagccttaattcaaagactatatcatcatccaattaatcaacttcaatctcaaacttataagcagcttaatgctttgagccgcttctatgaccagttaacagctgacttagtaatggctaaaaatcgactttaccaagctctacaatcgacttttcctgaaattgaaaatctattttcttctgctaaaggtaaaaattactggcaaatagttgtgcgatatcctcattgtgacttagtaagaagagaagataaaaaacagcttattaactggttaatgagcttaaaggggattgcttttaaacacgctctaaggactgcagataaattaattgaattagcttatcaagcttatccagttgtatcttgctctagcatagaagtcgagcaagtgcagtattatgcacacagattgcttaatttaagtgatcaaagagaaaatttaatcgcaagaatggttaagttagcgaagtctttgcctaatcatgatttagaaaacctagaaagcattccaggctttgcacagaccactgctgtcagagttttagcagagttaggagatttacgcagatttagtaatcctaataaaatcaatgcttttatcggaattgatccaggcagatatcagtcaggagaaatggactctaatttaagtattactaaacatggcaatgcagtcgcacgtaagttgctttatcgagctattggacaaattgataatgcagctaagacaaatccgtgtcatatagcagattattatgaaagcaaaaagctatcctctcaaaccaaagggttcaaaaagatagctattgcttcaattcataaactaatcagaaccatttatgccctgattatcaatgatcaaccatatgattacaacgtagccacacataatcaaaaagactttagtcgtaattaattgatcaagtacattataacgctaagcccaaaaatcagatatggatctgggcttatttgtcgtgtctaactaaaaaaataaatcgacactaaaagatgtttaagttgaaatttaaacaaaaaatgaagtcaaacttcttattatgcttgactttacgtagaaaaagtgtctgggaaaaaactagcttccagatgaataaaaacgatcaagatttccttttttaagaatcttgatcgtttttttgttctctttaaaatttttaacaataaaaatcggcccttcagccaccttctttgacaatatttgttcaaattcatcatcataaaggcaattccgatatcggtttcgaccttctctttacctcgcaggtgcgttctgcgcatgccaaatacgttcttcaaatgtccgaaaactggctctacatcatattttctcatgccatagatgtgtctgccttcttcgctttggagaacttcttttgctttttcttttaaatattgccagttaggattatagcgaacttggcgctggcggccgctagctgttttagccaattgttccaattctggcgttagctggaactcgtctgcctcataaaccttaaaatcacggacctgaccagtagaacgatccttgcgctggctgtaatatttgaaattgaatctgacgccatgatgatcaatgtaataatcatctttttcattgtagtaccagttgattagcttagttggatcattcttatactttttggtctgttctttttcatacatagtgtagggaataaagtacttcttgtctggatatttttcctccagcatcgaataattgtattcactgccatagccagcatcggcgacgattttgtcaaacttgtccaacacggtcatttgatccaaaaccggctccaaagttttgaaatctgtcggattaggaaagatggcataatcaactacatattgatcggtcgtgactgcttgaatattgtagccaggctttaattgaccatttttcatgtggtcttccttcatatgcataaaggtggcgtcatgatctgttttggaataactgttgcgtccggcaaagatctcttcggcttcttcatatttttgcattcttggcacataatcttttcttagccggtgcagaatcttttttagtccacgtcgcttggcttttcgaggtgaaccgccaggaatggctttgttttcctgctcaatctctttagtcagcttgttaatttctgcttcagtttcttgagctaattcctttagcccctgactagtttgaactttttctttttccatttctttgactacttctttagtaatcaattcatcataaagttcaactgcctggcctttcagcttttcatgatacttttcaaccgctttgcgccagacaaatgtatagcggttagcatcagcttcaatcttagtaccatcgataaaagcagcaccttcattgattaagccttcatcttctaacaggttagtgaagtagataaagctctttttaatcagttcattggcatggctgcttgatctaaaattattgatagtatgatatgaaatcttttgctggtcagccaagatcatcattggcagattttcttccagcatcaactcaatctttctgccagaaaaaactcttctggagtaagcaaaaagcagtattttgagcatcatggctggatgataggctgggcggcccgttttagcagtcttgcctactaaaacatcttctggaattgaatctacaaaccagctgatgacattagccaaatgattggccggaatggcaaaatctagattaagtgttaaagcagtttgacctgtgatataatttttgtacatgttagtttccacctttttgtttttattttgtgatgatttaataatatcaaggctggagctaaaagtatacaaaaagagcgttgaaacaaaaattcaacgttcttttttcatgatctgagacttagttttttcccagacactcagttcactatttactcgacactcgcttttacaatatctcccttgcccctattcaattccatcaaaacgataaagtcagctttttggagttgactccaaaaagcagcaataaatgtcatttgtttggagttcattccaaacttttactaacccttgatactatcaatcccacagccaactacgacgggattcaaaaaatcaatcttattgattggctactacaataattacaacgtaaaaaaccacattactcacttcaatttttgagcaatgtggttttatttttctgtaattttaatgctttctacaacctaccattctcttcatccatggttcgttccatcaaatcatgaactgcatccatgtcattcagtaatacttcctccttagctgttaaggttctctcttccttggcttcagtcaacatacgatgatgccaacccagaatatcactcaatctagtgtacattataaagcccaagaccttactatcttccaacagctgacgtagttctttttctggctccttatagcgctcatcttcatcccaagcagcaaaatcatcaataaccttttccactaacttatgaagttcttcctcgcttttcattaactgtattctttactatttgttgtttacagtcaaccacattttgaaaaaatctcacataatagaaatttaatcatattattcaaaatattcttaagcaaattaaaaagagcccagacaggtgactaaaccgtttgaactcttggattaggaaacttttttagtttcaaactacaacgtcagattaattattgaatttcttgtagttttggatgtagcgcttagtgcggcagccaagcaagtcgccagcgtgttcccattcagtatacttagaagcatcgcccatttggctacttgagccagcaaagccaccgaagagcatctgcttaacgttgaagtagatttggctcttcaaagccgacattgtacggtagttggtgttaaattctgaagaaattggcaaacctgcttcatcttcgtaaacttgaccaacacgtgagttaagacctgaagccttggctgcacgttcaataccagtaacatagtgatcaggatcccagcaagacttgttgtttgagtaatattgattagctacacggtcagcaaaatttaatgcaccgcgcttgtaagtccaagattgcttgccaagttgattacgagcagaattaatcaattccaaagtgtagttgcttaattcaactttttgactatcagttaacttagttacattaaccaaggtgttgtctgaaccagcatcactatcattattttctttcatacccttaattgaggcatttaccaaagccttgctggccttaccagtttggttccatttgataacggcatccttggtgtaaccagaaggtaatgttattgatgcagcatcaacatttgaagtttcttgattgttaactgcagtaattgcaccacctgctaaagcaacggcaatgctaattgttgataaaagtttaatgctctttttcattttcctaatcccctatttattatttatgaaagctcgaaatttttaagtccttattattttcaagctttaaatttaaactcatttatttaagaagtagtcggtttcttaaacttcgttataagtctcttcacttaatagggtagcaggttaaataaagaagtctatatgcgtaaatatttaataacaaacctagataacatcttaaaagatattgaaagctctttcaaatgcgatagcattaggttaagcaaattaaataaccatttctatataattaactgaaacttgaaagctaagattaacgctctttccccgcgcctcttggctttttcttatcaaaaataaaaacgcaggatctctctgcgttatactttaagtgtcgacctaaaaagtaaaggagatcctgcgcaatgaacagtatagaacaaatcgacacagaaaacgatactaaatccttaatttcttcatttattaatctaattggtctagctaagttaactaaacaagtcaattttaagcgtaaatccaccgtttcattaaccatgattatctcttggctgatgtcagtacattttgctcggctttctttattcagagctaaggatgacaaacgtttttccgttagaactgctcgcaatgtacttaacgatggaagaatcaactggcaaaaactattatgcttgattgcagcccggctcattggctgcttaaaaccatttatcgataaaagacgccgacttgcttttatcgttgacgatacgctgatggctcggtctttttctaaaaagaccgaattgctagctaaagtctatgaccatgacaagcatgagtatttgaacggatatcgtggtttaactttaggctggagcgatggcaataccttcttgccggttaactttgccttgatgtcaaccaaaaccaagaaaaatatgattggagctgctcccattactgctgatgaacgttcaatttctggtaaaaggagaaatcaagctcagagaaagatgaatgatgtaactgtagagttgattagacaagccttacgattaggagtagaagctaaatacgtcttattcgattcttggttttcttctccaagaatgttttggattttaaagaagatcggtttagatggacttggcatgatcaagaagagttcaaagatttattacatttatcgccattgccgctatagcgttaaagacttgtatgatcgtttggctgcttcaaacatccgtaaaaagaaacattatctttattcaagcatagttgaggctcaatatcatggacatagctttttattaaagctcgtctttgtctccaaccgtggaaacaagaacaagtatttggttttagctactactcagacaaagcttagccctgaagaaatcatccaactttatggtcgtagatggcaaattgaaacatattttaagacgtctaagcaatatcttgctttagataaatctcaagttcaaagctatgatggccaatgtggctatatcgcagttacagcaataacttatgatctattgacctggcaggaaagacaaaatacagatgataagacaatcggagatttattctatctaatgaacgaatccttacctgatattagattcgtagatgcattggtctacttaatttcagaattaaaagagcttaaacagaatagttttgaaaagatagatgaagtaatcaatgactttattaaccaactgccacgattcatacaaattgcactgaaacagatcatataaaaactaattacgtctaagaaagctcaatagtgacaggacttgagcttgattttggtgctttcaattttcagataattaataaacaatttcgaatttttttacttctgctctaaaatatataatatattatcccggatttaaaattgaagtgcaacactaagtgttaaacaaaaaggccatgaagacctaaacttgaagtgacgaaaaatcaagaaaggaagatcttcatgaccaattcaaattctagcatttctaagcactatcatcaattaaccagcgtacaacgtggacaaattcaagcaatgctggattccggcataacttcccgtactgttatcgctcaagaagttggctgccataagtcgacaatcagtcgcgaaatcaaacgcggaagcgtcctgcaaagagacagcagctatttattgtatgagcactattacgctgatactgcacagatttattatgagaagcgtcgcaaaaactgctatcagcgcaatccattgaagcattatgctgtctttttgagaatgctctccagacgctttaaagctaaatttgatgccaccagcatcgatgagttcgttggtgaattcaaaaggactatgccaggctacccttgtcccagcacaccaaccgtctatcgctatattgatcagggcttgctggacataagcaatattgatctgcctatgaagctcaaaagacgcaggaacaagcgtcatcacagccatggcggtcacgctttgcacaagaagcatcttggcaattccattgaacagcgtcctaaggaggttgaagacagaaaagctccgctgcactgggaaggagatctggttaaaggcgtcagacgcaagaatcagcctgctttaatgactttgactgaaagaaccacacgctttgaagtagttatcaagattcctgactatcgggcaagcacatgccaaaggctgcttcaaaaggagattgacagacatcctgcctggtttaaatcaatcacgtttgacaatggctctgagtttgcggatatgaccaagatcaagggctgccagatttactttgctcacccatattctccatgggaaaggggcaccaatgagaactgcaatggtcttttgcgtcaattcttccctaagggcaagagcatgaaagacaagtcaaaagcttatgttcaacaggcaactgatgccattaaccacaaatatcgccgaatcctccaatatcacacagcagaggaactcttcaagcaatatatctcttcataacctaactgttgcacttaatttgacaattcaggatataatatattatataaatataaccatagttatcttcattaggctaaaaagctatattaaataatccttgttatatcagcatttaaggagattttatacaatttaaatatacacatatagacttcaaactgcctaatcatttataaaattacaaatcataaaaaactaccaagattctcaaaaaagaaaatcttgatcgttttcaatcatctggaagggaatttttcttaagaaagattatttagcaaatcccaccttataccaaatcgaatttgattcagccggtttaagtgaatagttaaccagcttgctattcacagccttaatggagtaagaattagtcattggcacaatataagcttcatcattcatatattgctgccacttatgaaaggccttaacccgatatgcatgattaaacgccttagacgaatcaatttcattgagtaatttgttgttctcttttgtcacaaatcttgagtcattcattgcactagtttcactatagattcctctaggtgatggttcactagacaatgaccaggaagcaataaacatgtctatatttttatcgtcttggtctaacttatcatagaaagaattgaattccattaatctgtttccagttaaactcacatgaagtccaatctttctccattgttggatgtagttttgaataattggttcttgaacggcggacccactcatagctgctaaatgaatgctcaatggttttccgttaggttgaactctccatttgcctttcttcttatatcccgccttatctaacaattcacttgctttctttaagttgtaaggatagcctttagaatttttatcaaagtaatcaccaaattgttcaggaattaaggttggcactctaaaagtcaaaccttgcgtgtatctcttttcaacttgattaatattcattgcataagcaattgcttgccgtaaagatttgctattcatcttagaattaggattcataacattcttaccatcttgccatttacccactttgaagccgagatagctgtaagcaagaggaattttagcaatgaattttgtatctttcgcatctttaactgcttgccattgtgaatttaccacatcggctatatcaaacttatgactcttaatagcttgggatgcggaattagtagaaactacctgagcaacaattttgcttaattttggtgtacctctccagtaatatttatttggaacctaagttacagattgtcctctaactaccttgctaactttataagggccaaaaaagataggattttttctaatttgatctgatgaaaccaatttactgaaaggaatattctttagataatgatacggagcagcagtttcaataaagtaatcattacctgattgcaacataccaggcttcattgaaagaaaatgaatgacaatggttctgccattttcaccattaggaaattgaataccagaaatagtttttgcttttccattgtgataagctttcataccaacaatattttctaaagaatctgaataccgtaaactattagttgctttgttggcagtcatttcatatggatattctaagtctttagctacaacttgcttaccatccgaccatttaacacctttttttaccgtaatagtaattgtctttgcatttttatcaagtttaaaagtagcaggtcctttattattaatttgatatacgcgtggtgctagttaaatcgttctaggcaatatgccatattataagctaaaatggctatttctagccgctgctgaaagccagctaagctccttgctcggttattttcagcgttatagtaactgagcaaagaaaagtcgctttcaattgttcttctaattgccatcagttgatgattattatgttttttagcacctttcatgttttttcgatatggtgtccaaaggacatagcccataccttttaactcggcagctaagtcttttcctaagtagccttcatcgcctaaaagataatggttaattggatgagcattaatcatcaattctactgtttctttggcatcatgcactgatgctttagtgactgcgtagtcaagcaaatagccatcatcgcttactagcgcgtgcaccttgaaaccataataatagactttcttggttgctttatagccaatatcggctatgtcacggaagatcttaacacgataattacgaacaggctgacaaactggaacaggaaaactgtcaataattaaaaattctccagcaacctttacctcttgattccaagcttgacggatgcagcgaattaaaggcaaaagcatcttggctcgacgattaaagcgagaatgagataagccaacaaaaaatttacagaatcttctttgggattcaattccaatttcagtttgccaaatgagcatcgctaagatggagctgtcggaaagctttgtttgatcaatgttttttcgatgcgtaagcttatcaggcgcataaagattatatagtgaacgacaaattacatttaaacgactaaaactaacttgtaaatggtgagagaaacgattaagcttgaggtagttcaattagatcagactcttttctatttaatttacttacaacttgagtctaatccgattggacttttttattaactaaaacgatttaactagcaccacgcgtatttgatatgaattatcagtatcgaataacccctcattaccaaattgcatgacatcagaatcaacttgatcaactgataattgactatcaaaaatacctttaaaaggcgtatctgtttcgattgcgtagtttaaagtgccacctttctgtgcagttttttgtacagtttgttcaggaaatttctttgcactttttgctgcatttgtattgctttgaccacatgctactaaagttaaagcagcaccaataagtagaccagttgaaccaaataatttaattgacttcatagttttttctcttttctgtaacaaaaaaaggtccacatcccaattaggaatgtgaaccttgcttagtaatcaacttaattaattatttttaaacaaaattcgccgcacaccataatttaggatcacaaaataaaccatcattttggtggcggcgtcgtaattctactgttgctgaattttgtgattctaacatgatatgtagctcctttcttaaataattttaatattatgctaatcttattttattgttttgtcaataatgaattttgaattttatcgataatctgattcatcagttttaaaatgtttgtgtgaagggatttcatgagaactacgctctttttataaaaaaattgataagagacaaaagagtaagcagatatagacttctgctcactctttattttattgtaaaaagaaaaagaaccgaatcaaaatgattcggttccaaaagcgtcaaatttgtcaatgtcttaacttaatgatactgtcactaacttaaatcaaacaaaagcaaccagtatagatcttttatctacactggttgctttattaattgatattgcagtatggccttactactgcattgtatttagaattatttgtctttagcttcagtgcttctttcgtactagtcattttaacttaggctaattccactcaatactaatcttgatcgcttttttcaacgtttgatagacagtagatactcttaaaatatctttaacaaatttatcttgatcttcatgagacataggactatcaaatgatattttgatagttatcgtatcaacatctggcattccgtgtgataatctctcggtattcgcttccgcattaatcttaaaattttgaacgtccagatggtgcgccttaataagcaatccagctgaaatagacatacaagaatttaatgccccagttaaatattcaacaggatcagggcctccagttttatcaccattgtcagctataaagcgatatctggcagttgaattttcaatttgccattcagtatcgcttaattcactatttaccacatattttgtcatttttccctccactctacaactattctgccttaagttttcaacctaattatactctatcgtggatctagttcgtatatgttgttttgcaccccgatgagatcacggacattaaaccaaaagcagtccatgatttctcatgaactgcttagaaagagatacttctaatattttcgaatttttattgatgttactctgtgacctacatctttataaagaatgatattagccctttccttggttggtacaatatagtcacgtagattaactaaattaactgtccgccaaaccttttttgcataatcaattgattcatctaaaggaatatgagcccaatgataaaagaaattattaggattatctttattaatatctagcaaacatttaaagcgagttaagaaccattcctctaataagttttcactggcatcaatatagatggatagatctatataatcactgataatcttctcttcattttcaggaatttgcaaaatatcgattccttctaaaatcaaaatatctggattggtaatgctacgatatttaccaggaactatgtctgaaagctcatgtgagtatacaggataggaaacttcctctaccccatcacttacttgagaaagaaaatcatttaatagtgatacattgtaactttcaggaaagcctttgcgtgacattaaattcttttgctccagtactttgttgggataaataaagccatcagtcgtcaatgattgaacatctaaatcagagtaaaattgactaataagagtctctattactttagcagtcgttgactttcctgcagcaactgatccagtaattcccaggataaatggctggtttaaatcagcactcttaatgtaatttgtctttaatttagagaacattttcttattttgaacgcaaatcaatatatattgaactaataggatatatacttcttgaagttcattgactgtaacctgtaacttattttgatcaataaaactttttaatagttcataagaaggaagctcaatcttagagtttaatttagtccagtgattacggtcaacagtaataaaattattcatcatttacgctcttttaagtaccaaattaagaggtgtaacaattatagggacaagaattgcattaaatatcgcttctaccaagccgttgaaacctagagcagtgactagaattaccaacaatggagttgactgacaaaaatgccctaagtaacttgttaaggtgcttgaattagacataaacattaaatcggtaagtaaaattacaagaatagtgttcgtcagcgaagcaactgctccactgagcatataccctatcttttgaatatgtgcatccctatctttaaacttctgactaattaatccaggaaagaatcctgctagaacactaggaacaagagagattactggattttggaacaaaagcaagctgaccatatcccctggttgtgtataggccacaactaaacgagtaattccccaaactaatccaaaacccaatccccatttcggtcccattaaagtcccataaacagcaatggttaatggaatagtagtaattgcaggaagactaggaagaattcttacatacccaacattcggaacaaatgtctggataaaaagcaatgcaataaatacagctgtgatcgttaaattggtaatttcttttctagtcttcataatgatacgctccttgccatatgttgatttttcattcttattagagcacgatttacacaagcaggaacagcatctgaaatatcgcctccaaatagcataatttctcttacaatactagaagatatgtatgaacattcagggtttgaaaatagaatcaaagtttctatattggggtccattttcttagtcattaatgctatttgttgttcataaacaaagtcctcattatttctcacatcacgaacaataacatcagcatttaattcatgaaccaaattaacagttaaatcactttgaacaaggctcacggaaacattaggataaacagacacagcgtctttaacaaattgatatctttgttgaggagaaaacataccatttttggaggtattatttgaaacaacaacgactaacttatcaaataattttgaagcacgactaatgatatctaagtgaccattagttattggatcaaagctacctggaaatatagctttcataatgattcttccttaatttttaatcaattgatatctttttatatttagaaaagtatttcaaaaaccaatttttagcgtattctactgttggatcttcagtggaattcatagtatgacaaatcgatatcttccaaggaaattcaggtgtaatttcagcattctttattgcatgatcactataattctttcctattggagcagccacaataccaattaaattcttatcacgttgaactaaatttaaaatcaaatcccatgattgtgtttgaagaaaataattaggtttcagcctatcacctttaaatcttttgttcaattgaaaggtaaccataaaatcatctgtcagagtaacaatcttttctttttctatttcagagaatggaatcggaccagtaaaatcattaaaacgatgttctttattaaaccaaaccctaactgtattttcgtatattaaatcctcataaataccttcaacagtcgctggagaaacaatcacagctagatcaatatcacctaaaatcaacatcctttgtaattcataagctccacgctcgataatttttagttgaatgcctggattttggttaataaaggctattaacgcatcattgaacacggtcgatataataactggtgcaatacctaatctaacagttccgttactattttctgataattcatttagtttcgaaaccatttcaatatattgttcatacacttttttagattccttaactaaagttataccgtaacgtgtcaatccaacgattttaccctttcgccgattaaagatttttacttgttgcttaaattccatatctttaatcgctttactaatagcgggttgagaaatatggaggacttcagcactacgagttaagttaaagtcattatctgctattgtgagcaaataacggatttggttaatatccaactttgcatccccctatgaattaaaacacttaactatttcttatcgtttttgatattcatgactggctcttgaaaaattctcggatccatctcctgcaaattgtcactaataattggcttaaattccatttgatcaagaatatctttttgtaaatcaatgcctggcgcaatttccagtaattcaataccgcctttaactagcttaaatacggctctttcagttacataccaaacttcttgattactgtcatatgcgactttacctgagaaggtaatttgttgaacatgctttacaaatttctttactttaccttcttggataatgtttaacttaccgtccttgatttcttccttaagtccagctgcagtgaacgtaccagtgaagacaatcttaggtgtatattgagtaatatcaacgaaaccaccagtaccggcaatcttaggaccaaattttgaaacatttaagttaccatattggtcagcttcagctaaacctaagtaagttgcgtcaagtccaccaccgttgtagaaatcgaacatgtaaggttcatcaatagtagcttgaggagcaatagctgtaccaaaactaccaccacctaatgaagtgccaccgaatgtacctgcttcaacagtagttacgatattgtcagataatccttcctctttcataaccattgcgcaatacattggatattgaccaataccgaagtttacacaatggtcggtatcaggattgaataagaatgcagctcttctagcaataaccttctttttatcaagaggtaagtccatttgcttaacgtcttttacaatattagacttaataatatctggattgtaaatgtaatcggtagtctgtttagtcatttcaggattatcagtcggaactacataatcaactaaaacgccaggaactctgacggcctttggatcaagactaccagccttaacaacacgcttaacttgaacaattaccttaccaccattgttgtgagctgccatagcaacagcagtaacatccatggttaaaggctcatcatcaaatgtgatattgccgttttcatcagcataagtaccacggaaaattgatacatctggctttggtgtttcataagctaattaatcttttccatgaatcttaattctatttaccaaagtagaattctttgcagcttcatttaaacgaccaccatcattttctgggtcaacgaaagttcctaatccagtatgagttactagaactggacggtgagcagctgcatctctaaacaattgtgaaattgtaccttgtgggaaattaaaggcttcaaaatcattatccgcaaccattggtgcaagctttggcgctaatgacccaagcccaccaactactcgacggagcattcctttttcagcaaagttttcaacggctgagcctttgttatcaccgataccacatccataccaaacatccaaatcctttggatgtccagtttcttggtatctatttttcatcatttcaagaatttcttcagcgacatcagtgccaaggcagccatcaagagctacactagcgttatctgggaccaattctgctgcagttttactgtcaataactttaacagacatagatttatcctcctatgtttaaatctaactaactacgtttctactgaattggaaaccagatgagtttaataatatgtatgagagtatgtttcaaattagtagaattttggaatcatttaattccttgacacttataaggtaccgcttacatctagcattgtgaaatcattaatttttagcattatcataactattggttataacttataataataataaaaaaggcgaaattacattcgcctttatttaatgcttgattataaatattttatgtattaattccacagccataaaatggctttaaattacatgatttcgatgtttttattcaatactttttgagcatcatccattaaatctttaacaatttctgcagcaggcttagattctttaattagaccagcaacttcaccagccataaagaaactcttatcagggtcatcttctcttacaccaacgtatagtcccttgttcaatgctgaattaaattcatctcttgatacgcctgtcttttcaagttcaaacaacttgccagcttcctcattagcaataccacgagtagcaccacccttgatagtagagccaacaacagcagtaccagtatcagtagcatcgatgacagctttacgccagttatcacctactgggctttctttagcaattgaaaagattgtaccacattgtacaccttcagcaccagcaacaaatgcttcaacaacaccacgaccgtcaccgataccgccagcagcgattaatggaatattaattgcatcagcaatttgtggccataataccattgaagtagttccaccaatgtgaccgccggcttccataccttcaacgataactgcatcagcacccatttcttccattttcttggcaatcttaacattaggaataaccggcattaccttaattccagcagcttttaaatcagacatatatggttttggtgtgccggcaccagtagtaacaatctttacaccttcatcaataattactttaacgtgctctggtgtattcttgtccatcagcatcaagttaacggcaaatggcttgtcagttaacttcgtggccttttgaatttgctctcttaattcatctggagtcttgcctccagcagcgataatacctaaaccaccaccgttggaaacagcggctgctaaatcagcagtagctacttcttgcatagcaccttgtacaactggatatttaatacctaataattctgtgactctattcataatttatctcctagtatcaactaaacaaaacacattaatttttcaattacttgccagtaaagttcttttctctcttttcaacgaatcctgccataccttctttttggtctgcagtaccaaacatttcagcccaaatttggctctcaagatcgatagcaatatcaagtggtaaatctgcacctctatcaactgagtacttagcacgagctactgataatggggcattcttcataatcttatgagcgatttccatagctttgtccatcaattcatcaggttctgcaatttcatcgaataaaccgattctatatgcttccttagcatcaatcatgtcgcaggtagcaattaattccttagccttacctctacctacaacacgagttaatctttgagtaccaccaaatccagggataatacccaagccagtttctggttgaccaaccttagcctttgtagaaccaattctcatatcacatgaacatgcaagttcacagccaccacctagagcataaccgttaacagcagcgataacgaattgtggcaaatgttcaatttcgccaaataatgagtgagcaagttttgataacttcaaagcttcagttacattatcattttgcatttccttaatgtcagcacctgcgacaaatgacttagcgcctgaacctgtaacgattaagacacgaatgtcatctcttgctttaacttctcttaaagcatcaccaatatcttgcaaagttgctaagttcaaggcatttaaagcttttggacgattaatggttaaaacagcaatgccatcttctgcttcatctaacaaaacattttcgtatttattaaaactcataattttgtcctttcaaaaaacaaactcatctttcgctctcatcgccattaatttttgttcaagtgtgcacaaaattcaaatttacaattattttcaaatatttttgtgaattatatgtaagcgcttgtcctcgtagtgtgtaagcgccatattacttttggttatatctaatataataagtcaaatatcattgtgaattatttattatagccctttgtaaaccgctttcattacaaggaattttaaccatataactttatttaatagttataataacaattactattagctaggccttatagaattgtcatttctaacttaagctgcatataatcaggttgacattatattaaaaggagtgggaaatatgtcgggaccatggatatctcgttatattgcagagttttttggtactgcaattttagtaattttaggtaatggtgctgtagcaaattcatttttaaacggcactacaggtaatggaaaagatggccaatcaaatggtggttggaatttcattgcttggggttttggatttggtgttatgttgcctgccatgctatttggctcgatttctggtaaccacattaatccagccattactataggtgaagccgtatgcggaattttcccttgggctcacgttgttcaatatataattgctcaaatgcttggtgcgattgtcggtcaacttctagttgttgcgatttattgggtgtactttaaagaaactcctaataatgaaggagcaattttagcttgtttctccactggtgaaaccttaaacaataagctcaacggttttatcagtgaattcattgatactgccattttaggatttgtcgcaatgggactttatcgtggaatgttctttaaacaatctatcgatattgcaaacattggtatcggactaattattaccgcactagttatggccggcggtggtcctactggtcccgcattaaatcctgctagagacttaggtccaagaattgtacacgcaattctacctattccaaacaaaggggattcaaactgggattacagttggattcctgtagttgctacaactttaggagcaatactaggaatttggctatataaaattagttttggtttataaattaagcaaatacaagaataatgatgcattaaacgtcacttactcgttttctatactaggagaaaagtgatatgaattttctaactaatgatggaattaaaattaactatcatgtgaaaggtaatggtaaacctcttatattcgtgacaggatttggtggtcaccaagagattgggaaattacaagtagattatttttctgaacttggctatcaggttattacttacgatcatcgtaatttcggtcgtagcgagcgaactaaaaaaggtcacactttaaatcgattaacttacgatttgattgagttagttgaacatctaggaattaaaaaagcggcttttataggccattcaatgggtggtagcgtactctataatttaatcagattaaaaccaagtatcgttcaattagcagtcataattgatcaaacaccttttatgataaatacaactgattggaaatacggctttatgaattatactgtagacaattatattgaagaagctaaaaaagttcccaatgttcacgaaactcttcacggattagatgtcagagtaatgcctggtttaaaagaagctaaggtagctcatccatttagcagaactgacaattttgatttgttgtgcgaacacgctactaaagactggcgaaaggtggttcaaaatgcctctatgccgatctttgtagttgcagcaattaaaagtccatattataattctgactttaccacatggatgactcaacaaaacgataatgttaaagctacattagttgctaacagcggtcacgatatcatggctgaagttcctgatcattttaataaaattctttacaatttcctgttagaaaatcattattcaagtagataaagaagacattaactataagaaaaggcgtaggttcatatcacaacctatgcctttttcacactataataatatttttactttacgctatacttttctttcccattaacaaaagtctttagaacattaagattactatctagcacattaaaatcagcatccctatctggcaggatacaaccacagttttcatttagactacgtgcaggagtatatgttgccatcttaattgcctcatatggcttacatacttcccaatttactaagtttcttactgctttatccaaagtcaatgtgctgccagctaatttaccattttctaacaatgcaatgtgattcctaactgttactttcataccactaagcacatattcaccatcaggcatcccaccagtacgtaagcaatcagtcattaatacaatatgattaggtccctttaaatcaaacaacatctgcaaaatgatcggctttatatggtgaccatcagctatcatttcatcaaatacatcgtcagctgttaatgcacagccaataatattaggtgtatgctgagataataagttcataccattaaacgtatgattaaacattgtagctcctgcgtcaagggcttttcgtgcttcttcatatgttgcactagtatgtcctaaagaagcaactacgccttttttaacgatatgtctgacaaattgtgggacattttttcgttctggtgctagtgatatctttctcagcatcccatcagaatctctgtaccacttatcaaattcttcaattgaaggatcctccataaactcaggattttctgcaccgccatgttctttagtgaagtatgagccttcaaagtgaatacctaatatctttgcgcctttttcctgccctttatgtgcagcaaacgttttacaaatttcatctaatttctcagatgaagtagttactgtggtcggcatccaacttgttacaccatattgaagaagtttttcagaaattttattgatttcgttccaatcacagtcgttaacatcattattcattaatccatgaatatgcgtatcaacataccctggagctattgagaaattcttgaaatctaaaattgcagcactttttggtttttcatcttcagaataataaaatccaaattgtccattatcttgaatttctaagtatcctcgttcttcaacaccatgatctaaataaaacttctttgcatgaataaaatatgacattttatacctcgctttttctataaaaattcgactttataaccaaaaataaacaagctacgtctgccttttacaaacgtagcttgttttgggagaggggaaatttataactaatcagaagatcatttattcaaaaacactcgtaaatgtcttagcaatttgcaatggtcttgtaattgcaccaccaataacaattccggctggtccaatatcaatcattttctttaattgttctggactgtggatttttccttcagcaataactggcattccagcatcaaccaaagctttaactaaatcataatctggatgatctgaaacaggactttcttcagtgtagcctgacaaagtggtaccaacaaagtcaacaccagcatcataagcattctttgcttcttcaaagttagaagtatcagccattaataaacggtcaggatatttagtcttaatttcatcaataaattctgcaacagttttaccatcatgacgtgggcgcaatgtacaatcaagtgcaattacttcgacatctgttttagctaattcatctacttccttcatagtagcggtaataaatggcttctcaggtggatattctttcttaataataccaatcattggcaggtcaggaactacttccttaatttgcttaatatctctaatggagttagctctcaaaccaactgcacccgcttctttagcggctttagccatcagaggcattatgccaccctcttcggtgtaaagtggctcgccaggtaaagcctgacaagaaataattaatccattatgaactttttgaataaactcttcttttttcatttttatctcctaaaaatttaccttattctaaagcattactactagtgtccggtggattttctgggaacttagtatcaaatagccagttaaatgcggcactatcaacataataaaacattgcttcatgaccatattctggtaacagcatgtgttttttagggctttctatcctattgaaaattgcaaactgcgttgctggaaaacaagtatcatcttcaagtcctgtaaacattaaaactggacactttattctatgagcaaagtttttaacatcgatataagacagagtacgcatcaacttgtcttccgtcttatgaaatggatcataaaacttaaaatacctaaataactcatcatatggcaatcctcgatcacccatttctagtacatgcttgaaatcagaaagaaacgggtattgagtagcacattttttaatacgtggatttaatgccgcagcaatcaaagataaagcaccaccttgagatccaccccaagaatatagatgttccttgtctacacgtgacatatccgcgactgtttcaattaacgtgtatacatctagatatacatttttataaaacagatgatctggtccatccactgctccacgaattatgtggcctaaaacggtatttccagcataagtaccgttatcaaccgactgcccttgttggcctctaacatccattgcaacaacgcctacacctatcgcagcatattgcatgaaatcaacccaatcgagagcttgtcccatgtaaccatggaaatagaaaactactggaatatttttttcatgtgctggaaaaatgcatttagcatgaactattccgttatcagtacctttgaagaacaaatcataaaaaacaacgtttttaatattatcgccaaaatttcttttaattaatttaaatggctttgcttctatctttttgatttctttgctccaaaaactatcaaaatcatctggaacttctaatctacctcgatatgactccatatcttttaaggacattgaatctttcattatagtttcacctttttcaactaatccttaaccttctcattgatagttttagcagttaaacctgtgatatcatgtgcatattttggagtaaccaaaccaattaaccaagcaattacgaatgaactaatgaaggctacaattggttgtaccaatgttgcaacacccattacttgacaccaataagtaagagcagcactaattaatacgccccagacagcactaacacggttggctgacttagtaaagataccagcagcaaaaataccagcaactggaacaccaaacaaaccagtaattgaaaggaagatattccaagtttgagatgcattacccatcaacaagtaaatagcaattcctaaactaaatacaccggcgatgacaataatgatacgagctagtgtaacatcattcatcttccatttcttatcaaaatatctttgcttgaagtcagttacgaaacatgaagaaatagcattcaaacttgaagcaatagttgactgagcagcagcgaagatacctgcaataattaaaccggctaaacctgctggaatcttggtaattacaaagtatggaacaatagcactagtgttaaaaccttttggtaaacttcccatcgtgtggtaataacaatacaagaaagtacccataccaaagaatacaaaaatagttacaattgctaaccaaccgtttgtccaaagtgacttggcagttgctttaatacttggagtagtctgataacgctgaacaacatcttgactagcggtatattgatacatactattgaagaattgaccagcaaagattactggaatgaacatagctaaattgttaggattccaatctttagcagataagaatttagaattatctacagcaacttgtgcgatcttcccaggtccaccagtatatacgactgctaaaatacaaattaataaagcaccaccaaggagaaggaaaccttgaataacatctgtccaaataacaccttcaataccgccgaggaatgcataaataatacacattgcaccaactaaaacagcaatcaatattggattaatatttgaaacggaagtaatagccaaaattggtaagtaaataacaatggctactctaccaatgtgataaagcataaatagcaaacttccgagtgaccgcatcactggtccaaaacgcttttccagatattcataagcagtagtaacctgtaattttctgaagaaaggtacataccatttaattaatataggaataattaaataaattgttaacgtcccaatcgaataaccccagtcagttaaaaaagcttgttctggtgttgacatgaacgtgatcgcacttaaagtagtagcccaaatactaaatcctgcagcccaagcaggcaccttaccttcagctttgaagaaagaatctgtacttttacttgcccgtttagtaaagtaagcaccaacgcctaacatcgctagcaaatatgcgattaagacgatccagttccacataccgaatcctgttttcgacataatttttctccccttttatttaattcatttttacttcttttctttgtgttcgcattatgaaaagtttcaatataataggcgcaatcaatgttgtgattactgtgacaacaatcattgcagtatagtgattttgatctattaattgtgattgaagagctacattagcaacaactagtgccatctctcctcttgaaaccatacctgcaccaacaatatttgcttctgtccaattaagatggaacatctttgctccgataccacaaccaatttgtttacccaagatggctataattattagtaaggcaataaacaataagtccttacccatgccattaaaactaatctgtaagccaatacttacaaagaacacaggaatgaaaactgcataaccaattggctcaatttttgttgataatctgtctgcataattagtttctgaaattgctaaaccagcaaaatatgcgcctaaaacatcgctcattcccattgcaactgctaaggcagctgcaccaaaacaaagaatcatcgcaccagctgtatcactttcagaagcattaagatcactaaaaatatctaagaattttggcacaacatacttaccaataagcaaaacaatgataaagaataataccatcggaatgatcattttaatgattgatgtatggtgaccaccaccgtagatactggagcaaattcctaataaaatgacacagataatatcatcagcaacagcagcaccacagataattgcaccttcacgagtatttaaacgattcatttcttttagaacttgaaccgtaatacttacagatgttgcgcttaaaactaagcccataaatatagatgcttttactgaaaatccaaaagccgtatggcacagaagatatgttgtaccagttggaaaaattactcctaaagtagctacagttaaagctggagcccaatatttaattaataatttcaaatctccttctaggccagcaatgaacatcaaaacgattacacctaattgagaaaaataattaatgaatgtggtgggctgaatccaatttaaaatagctgatccaactaaaatcccgactaataattctccaattacacttggcatttttgccttaactgaaaagtgtgccgcaattttagttaatagcagaatcaaaaatagttgtacaaggtacgtcatcaaagtcacctaccgcatgtctataacagcattgaccttgtcaagttcttgttcaatcttgttatcatcaatgccatattctaggaagattggaatttgaggatcaagtcctaaaatcattggttcccaatctgtagttccttcacctaacatcacagtttttttattcttaatatcctttagatgatagttagtaaccttatcttttaattctttaaaggcaacttcaggattttcaccaacccagtaccaattacctgttaatcacaagtagtaaattatgtatttaatatatctaaatatgcctattaatgatataattgaccgcaaagaaagcaggtctatttttatgtcaagaatttataaagttggcgaagctgctaagcttctcggtgtatctcgctctaccatgcaaagatgggatcgagaaaaaagactagttgctcagcgcaatgttgccaatcgcagatactatacgcaagagcggctggatgcttttaggggcattaagcctcaccgcaagacagttgcttatgcccgtgtttcttctgtaggtcagaaagaaaatcttaggcatcagatggctttcatcattgaatatgccaatgctagaggcatcattattgatgaacatgtagaagatattggatcagggcttaattataaccgcaaaaaatggaataaattattggatgaagtagaagcaggaaaaatagaacgaatctttgttacctataaagatcgttttgcccgctttggctttgattggtttgaacatttttgtgctaagcacgatactaaaattattgttttaaacaaccctgaaacctctccagatgaggaaatggttgaagacttaatttcagtaattcatgtgttttcatgtcggctttatgggttgagacggtacggcaggaagattaggcgggatttaaagaaggaaggtgaaaagagtgatcatcaaaaccagaacatatcgattaaaacccaatcaaaggatgaagaaggttcttgattcgctttgtgattacagacgcttcagctggaatctcggtttagaaacctggcaaaatatgcatgaagccagacaattggctttaacccagcatcttaaagcagaacttaaaaagcctagaaaaaaacaaaagcttacaaacgctgaaagagaaattctcgcaaacaatcctgtcccttcctggcgcagaattcgtgatgagctgactgaaaacaagcaatactggcagacaaagcttccagctcatgtctttaatttggcgatccaagacttaggcaatgcttggcagaatttttttgataaagcgcagccaggctggggaaagccaaaattcaagtctaaaaaagcacctaggcagggatttaaaatggatcaggccaaaattaaggatggctgcttatttttagaaaagcctagggctgtcaaagaaacatggaacggctttaaattaagctctgctccattgtcggatgatttcggaacaatcagcttttacaaagaaaaaaacagatactatgcatccattccttttaaaatatctgatccagaagacaagcctaagacaggcagatatacaggcgtggatatcaatgttggacatttcaattacagagacggtcaatgcatagtaatgcccaaatcgttagcagcagtctattgcaaaatcaagcattatcaaagacagctgtctaaaaagcgtgtcgtcaatggtaaaatcaaaggaatgcaaagcaagcgctacatgaaagcgagaaacaagcttcaagcagcttacgctcgtgctaaaaatattcaaaatgatttgatgcagaaatttaccacaaagctggttagcgaatatgattctattgtgattgaagacctaagcgttaaaggaatgcttatgagtcatgttgcctccaaaggaatgcacaggtcaatgtttggcagatttagacagatattgacttataaatgcgaatggtatggcaagaaattgatcgtagccaataaactgtacccttcaactcaaaggtgcgcagcctgcggattagtgaaaaaaggcgatgaaaaaatcactttaagaggcaataagaagcatggcaccaagcataatgaatttgtttgttataatccgaactgccgtaactataataaaaaagttgaccgtgacgaaaacgccatgctcaacttaataattctggtaaaacatccagaattaaataaagccttataaaaagaatgcgggcgaagctacgtccgaaaaagaagtcaaaagagtcggtcaatgcgattactcccaagttggaatatcggaaaactgatgaagacgttgataagaaaagcataggcatgttaagccataatgactacaaataaatacaatgtagttgtttgcatatgtttttcatagctgcatcataagtgaagccaatattaggatattgatttactgcttcaagacctttaagaacagtacttaaatagcctgtttcattagaaagattttccaatgtcaaatcaacgttagcatcttcaagaagcttcgcagcatcctcaatttccttttggtcaacatctttaacgtcacctacgaaatacttcaaatgcttcaattgatgcttttttgccatttcaacattgtctttcaaactgttattgacatgtccatcaatgaaaaattgttcaggaactgaataatacaatccccaactgttctttttacacaatgctttgattgcttcgagttcgtcgtctttggtgttttctttaaagaattctccacgaacttggatattgtcaattttatctttcaaatttgaaacatcctctaagcaatcaatttgactctctccgctattcaaacgatcaacaaagattgccgcattcactgaaactttcatgacttgcctcttttcttcaataaacgggattaaaaaaaccgtacaattatgctcagcatttgcctcacataagtacggttgaattttgctattagttaatacacctctagcatacacgaaaacaattttattgcaagcgatttctagaaattaattttcaaaaatgctagaaatacctccataaagttgtgcatcattacctaaagaagccatctttaatacggttttacatagatttggcggtaaaatctgattcaatttttcgtccaacaaatcttttaaataatctccctgcttggaaacagcaccaccaataactaatacttctggatcaagaagtaataatacactgcttaagccctctgcaacttgcaaggcccaagcatcaataattttcttttctctaaggcttccttttttggcacgtgcaaaggcttcaataggatcaatacctaagggttctaattctttttgtaatgcaatggttgatgaccgctgttcatagttagttgatgttattggatcaaataatgtatatcctattgaattacccgtttgatgatatccattaaataaatgtccatctgcccaaaatgcaccaccaattcctgttcctaatgcaacacaatagatagtactagcatttttaacacttccagctaatttttcccctaataaagccgcactaacatcattaacgacactgacaggaattttaaatgtccgctctagctctttcttaatgggagtaccttgatagtcagaaatagttggtccagcatacattatgcttccatcgtctccaacaataccggcggtactcacaccaatcccatctaattgatacttctgtatcatctctttggtaactttaataagtgacttcaaaatatgtccgtccttattatgtaatgtatcaactttgcctctatctgaaatctgaagattctcatctacaataccgtatttaatcgtggttccgccaacatcaaaagctaaatatttcttactcatttggttcacgccttcctgtataatcaagttcttatattaagcgctttcatagtatcatttaaaaacaattttctcaaataaaaatttagaaaataattttcgtgctctgtatctcttgatacacctacgctttgttcaatttttgaaaattattttcgcaatttagagttgcgtaaagcgttttcatgttctatactgcaggtgttggttgaatttgccattagttatacagtaattaaaaaaatattattttattttgactaaacggaggtcaaacaaatgcaaaaagtttatgcagccttaatggtttcatttgatgaagatggtaatattgatgaaaaaggtactcgtgaaatcattcgtcacgatatcgatgttgaaggtgttgacgggttatacgttggcggttcaactggtgaaaactttatgcttggcttagaagaaaagaagaagatcttcgaaattgcttgggacgaagttgaccaacaagttgacttgatcgctcaagtgggtggcccaaacttaaaagaagctaaagaattagctaagttcgttactgaattgggttacaagacaatttctgcagttactcctttctactataactttaccttcgacgaaattaagcattactacgatgaaatcgttaaggatgtagatgcaaagttattgatttactcaattcctgcattaacaggtgtttcactttcattggataactttgctaaattattctcaaatccaaagattatcggtgttaagtacactaatgcagacttctacttacttgaaagacttcgtgagcgcttccctgataagcttattctttcaggattcgatgaaatgttgttacctgctttaattgaaggtgtcgatggctgtatcggatcaacctacaacgttaatgcaagaatggttaaagaagaaattgctgcttacaacaacggagacattgctaaggcacaagaattagaacacaagaagaacgacattatcactgcccttcttaataacggtatttacccatcaattaagttagtattgcaaaagatgggcgtacatgctggctacaaccgtgaaccaatggctaaatacactgataaagttattgaaggcgctgacgaaatctacgctaaatattttaataagtaattgcttatttgccaaaaaactacaaatttagcataattaagcggagaaagattacaaaatctttctctgtttttttgatttaacacattaagaaggttttcaatatgacgtttttaactgatttacaaaataggctacccgatttacctcagcaagaaagaaaaattgctttatttatattacaggacccacagtttattcaatcagcaaatataaatcaattagcgtcaacaataaaagttagtaatgctactattactagatttgcacgtagagttaactgctctagttttacagatttaaaagtcaaattggctgctgctgcagcttcttcacaagtaaatactattactaatcaagataactctaaaacgaccgctcagcaagtatatgatttttacaatcgagttctatctgaaacacaaaataaacttgatataaaacaattaaaaaagataatccaactcatcaaatctgcaaagagagtttatttttatggtatcggttcttctggatataccagcttagaagctactcaaagattactaagaatgggtatatctgcgtttgcggaaacagaaagtaataatatgtttatgactagcagtatcatttcaaaagatgacctgattatagctatttcttcaacaggtagcacagattccttggtaagagccattgaactagcaaaaaagaataaagctacagttgtagcattaactagctatgacaatagcccattagctcagcttgctgatattgtagttggtgttcaagatacaaattatattaacgacgctcggtttattaactcacagttttcaataatgtatgtaatagacgtaattactacgctacttttaaagaataataaatatcacgatagaatgactcgaactattacttctgtcttaaatgaaaaatacgatgcatacaacaaatagcctgatatgattatcgtttgttatatctgatttaactatatttcatagatagtattaaccaattaaccttatatacctgatataataattatggtgaagagattaattggataattcataatacttcgcactctagaaaacgtcttctgttattgaaggcgtttttgttttgttcaagtgttttatttcctgaaatctaactggatatttttaggtattagcacaaaacagaaaaaaagccattgaaaacttgttttttatacaagtaatcaacggctatttttctatccaattctaacgttcttaaaatcgtatggaacgcctgtagggttaaaggaaacgccctttacggtagtctttaataattgtggcttagcaacttgaactaatggaatagttccttggtctttcatcaataccttctcggcttctactaatcttgcccagcgttttactggttgattgccatatacgttttctgattcattcaacagcttgttaaattgattgttattccaaccattgttcaaataacttgatcctttttggaaaacgtccaagaagttgattgggtcgccaaagacagcctgccagtttttaattgtagcttggtaattaccagctgtttgacgtgaaatcaattgagtatatggaattgtttgaacagaaatttgaacacctggaagttgatctagcttactttgaagaaattcagctgtttgctttgaagtatcgtcatcagaaactaacaaggtaattttaattgagttagtcttagattctttatacccttcgcgaagtaattgcttagccttagcaagattatacgatactgcactcttaacgtaagcatcatcttcaaatggtgttcctgtcttaggattattgcccatacctgatggaacgaagcctttagctgggattgaaccgtcttttaagacattatttgctaattgtttgcgattaattgctaaagaaaatgcctgacgtaccttaagattcttgaatgctggaaccttattttcgttaagttccaatcttttaatcgctgaagacaaacgtgcatggtagcctgctttattcttatttgcggcaacttgctcaccagtaagtccagtctcatctgccttacctgcttcaaaaagattatagctagtcgtagttgattcgctaacctgttcattaactttatttaatttaacatttttagcatcccagtaattcttattcttaattaaagtccaagtcttgttgttaccattccatctagtaagcgtgaatgggcctgaagaaactgtgtatttagcttgcgtgccgtataacttgccatatttttgcaccactttttgattttgcgggaaaaataatggccacgacaataaaatcttgaagtaaggcagtggtctagttaattgaattctcaaatgatatttagaaggagcagaaacacccaaggtatccggagacttttggcccttactaattgcttgcgcatttttgatctggtaaagatagaatgccatctgagacttagttactggattaacagtacgcttataagaatatacaaaatccttagcagttaatggatcgccgttagaccattttgcggtttttctaagataaaaatcataagtcttcccgccattagaagttttagccttagtagctagagataattgcggtttattgtttttatcaaggcggtatagtccgtccccggtattaagaagagcttgaaaactggtagtatcagttgccaaagaaggatcctgcgtagaaagctgtgtgatctctgaccaatttaaaacctgcttttttgaaacggtattactatctgattgcttaccacaagcagctaaggttgccgtagttaaagctattaatccgaatgaaacaacttttttatttattctcataaaaatctcctttgctaaaaacggtaaaaagaaaaacgccttactagatcaacttgatctaatagggcgttcagtaacgcggtaccacctatctttatggaaaaccaccttgaattgcgtacggccgtctggcgatacgttaccgctataacgggcggacccagaagctactaaaaacttcatagcttcaagctcaaaggccattttcaaaagtaggtcgatcattatctttcaccaagtgataactctctgtagaaggaccgccaatttactttccttatcatcgctaaataattaataattatgttgattaagataatagtctaaatcattttaaaagtcaaatataattttaatgcttttcattattttactaactattcttcagttagtcttattgactcatttcccaaccttcgcgcatatctttaactaatactgaagcatctaaatcaaggtctacctgttcatattctttttttaattctggatgtctctcaatatctttcttgatgaactcttgaatcttactcatcttatttcaccccatattggccttcatatgataaaagaccgttgatgtcaataactttaccgtagagagtatcatcttctaatgaatactccactgaaccataataacctttatatgataattcttttttcattagattttacctcataagttaatttcgtaaatactaaatcataaatctacagtttcatgatccagtgtttttcattttgtccaaatctacttaagttcaaactccaacctaaccggattatggtctgcatactcaaaatgagtattaatgttatacgcctttgcttgcacgtttttcgacacaataaagccatcacaaatggtcatataattaactttaggatcatatttcatgtctgtagcacgaacagtcgcaacattttcgcgattttgcgccttaatcatagtgaaatctttaggcagcattttttgatcaagaacggatacccaactaggaatttcttcttggtgctcaaaatgagtcatcatgtctttccctaacgcatgattaaagtcgccgccgacaatgacatagttacctcgtcgatattctttttccatcacagaagaaatcagtttcatctgtgccttacgcattttaccgcccttatcataagcagacatatgtgagttaatcattaccaaatcttttccattagttactggaaagcgcataactacaaagcaacgatctaaatcgacaaatttttcaataggcccactagaaacaggatattttcttcttatggcactatccatcttatatttgctcatactcaacaaccctgaacgtacagtgccatgaggattgttcaatggaaccgctaaaaaagcagagtggaaattactagcaaaagttgaatccatttttggaaaatcatcttcaacctttttcacctgattaacgtgaaagctacgagttgaatcagtatcaatttcctggaaaaacatgcagtcagggttctgctttttcattgtttgaatgacaccattagtggaatcaagaactgcttgtttagatattgctgtccctcgatgcccctgcggtttcttgccatccttcaactgacctgaatccataaagaagtcgaaatcatgattataagcaccaaagccaacattataagtcgttgtcttatagctacgcccccgcttttaataactgagactgattgttattaattttcaatctttgattatcaggaattcgataataatgtagagacaaatatatataatagccacagaagataattacacatgccagtatcactgacaacaacgctaatcccactttttttaagactttcatatttactcttttctaactgaatcatttttagctttacttaagatattatagtggtgtaattattaaaaaagaacccacttatagtgagttcttcttattagtcatgaaaatcaattgtagtcatagtaaaatttttaagccgaaaataattaggtacttgttttctcctcttcggcacacttccaaattagactttcgtttctcttaagaatatctagattatttctagtttcagaaggtgtaaagtcgtagttgtaaatttctttataatcaggcaactcatatctggcttctttaaatccataatctgtcggttgttcaaagtggaccaaaagctttttaccaccctttacattatcgtctaccattatttgagaatatgtaattgacaattccccaggaaattctgcatatggatacaacatgtggtcttcctatacaattttataatctgcagtatagttaataggctaattcagatcgacaaatcaaaaatttattaataatatctactggggtgtttttcttaaaagttaaagcgacttctgtatgctcattattagcccactcttctttttctatccaagggacaatatgatcattaaaatatagtgtttctttattcggcattttcaaatcatttagcacttgcattttctagcatccccctaataattgtattcaattctttatcacacgtatttcctatcacagaaaactcagctactacctcatttattttatgttctttaaagtaactatcttctgcatacgaactgattactttcctaagataaccaggatactgtagccttatataatgctcaagtttagaatcaaaaaacatctttgcttctttaatatatatcattatacttacttttatgtactttataaaagcttttaactgcatcccaatgtaatttatatccatattcatgccacaaaattcctctcatatctttagcaacgaaataacttgactttaaatgcgatttaacaatttgatgagtatagatacctttattaacataaataacatctttttcgcgatcgtaagcagctactaccttcaaatattttgaactaactattactaaatcaggaaacatgtatttattgtcatcttgtagtgaatccattattaacttagtagcctttctacttttcttatcatcattttctctccaaactttcaaattattgttgttaatagccaaatgagtatgaacacgacacacttgattttcaatatttttaaaacggtattccttcttttgagctaaaaaatccatataattcctttccttattactcaatagtcagttcattagtctgcccaaacacttttacaattatatcaaacatatgttttgaaaggaagtgccataattttagaaatttattttcacaacaaaaaaggcgatatcacaaagatatcgcctaattctatattttattcacttttaatactgtagatcgctaaattgcttgttggagttttgcttagccaaggcttcgctcttccagtagacagcattagttgttcccttagagttagctgaaacaattacactttgaccattttcagtatgcggtgccaaatatgtactgccttgacctggttcttgacccatattagtaaaactatagaaattaattccattaatagtagcttgtttcatatagcctgaactagttgatgaacctgaatttttagcctttacatccatgctaaaaccagcttcatcattgatcttattagcagttacagtcaaagtatcgatattgccattgccagtatctgcagtgtaccaagtaccttgcaagcttgatggaattacggcactagcagattccttagcaccagctgcattgtcattatcgccttcaagtttaacatttagtttggcatttttagccaagctttgaactagatcaacatcattatttttattaatgtaatcaactacatcttgtaaagttacagtaccaaggtttctttgcttaacaaaaatagtaattttcttttgtgctccatctccgtttagcatgtaacgagcattactgcttttaccggtaccggagacctcataaacatatcctgagtcatcagaagtaatacctgttgcggctttggttctgaacgcaacacctaaattaccatttttggcagcattaactgcaatttcccaagtgtcgccatacttttgtgcagcatagacagagattgcactagcctgcgtcttatagtccatattctcagcagataattttgctgagttttgactgttacttgattctgaggtgccagttttttctgagttactcttagaaacttgacttgatttttctgactgtgattgtgaattactattaccttgtgtactttggctacatcctgctaaagttaaagcagctgaaattgcaaccaaaacagttaatttacttttcaaaaggaatccccttttctttcaataattctatctctttgcttaatagtattataaaaaatacgatccgccaacttcttacatgattattttacaaaaattatacttcttgttcattgcaattattttaatacttctttacaaatattaatttaaagtcttaaattctgcatttcggtgttccttggctatcttggtgctcttccaataagtagccgtataatgacctgtatcaacgctataagttactactgccgtattgccattatctttttggacagaataaagtaagccaaaatcttgagcattcaatgtttgaacatgatagcaatttaatccattaatattttcgatccgagctctagcccactttttcgtttgatctaaggattctgctgctacaccagaattagaaatatgatgaatttcttcaccattaacagtatgatcagtaattactaacttctttcctttatagttgtaccaagtaccccaaagtctcgttggaactaatgctaggccatcgtcacccttaaccccatatttgtcagatgtaacttcagcagccaaagtagtcttagttgctaatttttctacagattttacttgattatgttcacttaaatatgaagctatttcagataaacttgctacacctaaatttttcttctgattataaaaatatacggtttcacttttcattgtataaaaagcattattttcttgaccattgccagttacttcataaatgtaacctctacctttttttatccaattaaaaccagttcgattttttacactaatgctcaaatgatttttcttggcatcactatatgcagtcttccatgcatccccatatttcatcgatccataaattgagattgcactagatttttcagtatctgacatactcttaacaattaatcttttgggagtctgtttctgagtcacaccagatttttcaatagtttggcgattattagtctgcttttgcgattggcaagcagttaaattgatcattgcagctatcaaacaaaatgctactaatgtcttatttctcattccatcgactccaatacattctcattaacacaaaagtatccctaaactaattagggataccagtccagtcattattacaattatatagcagtttgctcttctttgaagagaatattttttgatttttggtaaaagtttatcctactagatttaaaaacttatccataagttcacttatctaatcgtaattagactaattacgattagatatgcttttgaaaaatctatactttacaaaaaaatctcgtggcctcaatcaccacgagattttccaattacttatttatttttaccagttcatgtaacgttgacgttcccaatctgaaactgattgtgagtacttagaccattctaattcctttgattcaatgaagctgtgcattaagtgatcacctaatgagctcttaattaaatcatctttcttgaaggccttaattgcgttgtgaagagtagttggtaatggcttaataccatgttctgctctttcttcttcagtcatttcaaagatgttttcttcaactggcttcattggcatcttttgttctttaataccattcaaaccagcagttaaacatgcagcaagtaacaagtatgggttagcagtcggatcagctgaacgcatttccaaacgagtattgatttcaccagcacttggaatacgtacaagtggtgaacggttcttagcagcccaagcaatgtaaacaggagcttcaaaacctggaattaaacgcttgtatgagttaacggttgggttaccaattgcagtaatggcacgagcatgttccaaaataccattcaagaagtaaagagcagtatttgaaaggtggaattcgccatccttgtcataaaagacgttcttgccattcttaaataatgacatgttgttgtgcatcccgttaccagcttgaccttgaacaggcttagccataaagcttgcaaacaaaccgtgctttctagcaattgcacgcgttaccatcttaaaggtttggcatctgtcagcagtagtcaaagcatcatcgaatctaaagtcgatttcttgttgaccatcacctacttcgtggtgagctgcttcaacttcaaagcccatgccctcaagagtttcaacgatttcacgacggcatcttgcaccttcatcgtctgaagtcatgtcaaagtatgaagcatgatctggaacttcagtagtccaattgccatcttcgtctaacttgaaaagatggaattccatttcaaaaccaatatcaaaagtgtcgaatccagcttcattcatttcaccaagaacacgcttcaagttatttcttggatcaccagcaaatggcttgccatcagtggtgtgaactgaacaaatcaagcgaccaatcttaccaccgtgttcgtcaccccatggcaatactgtccaagttgagaagtctggatataaaaccatgtcactttcttcaagacgaacaaagccatcaattgaagaaccatcaaagcgaatgtcattagtcaaaactttatctaattgactcttaggtacttcaacggccttttcagtaccgttaatatcagtgaaggccaagcgtaaaaatctaacgtccttgtcttcaacttcttgcttaatttcttctgcagtatattgtttactcatagttaattcacctataaaaacaaaaaatattaaattggtatggtcctatgatttattcttatctcctagaactgtttaatacaatagcagaccaatttaaaaaagtcaaattggtctagtgattatttttaaattttattttttgttaaaaaatgtatcacgaaccgcgttaataatagctactttgtcatgcgcataagtcaagccgccctgcatataaaccgcataaggtggtctaattggaccatccgctgaaaattcaatagttgaaccggaaacgaaattaccagcagccataataatcttatcttcatagccctccatatgcacagcttcaggcgttacaaaggaatcaatcggtgagtttttctgtacttcttgcacaaatttaaccatcttatcaggatcaccaaaaataattgtctcaataatatcgcttcgcttctcatcccaagctggggtaacattcaagcccattttggcaaacaaagcagccgcaaaaatcatccccttttcagccataccggtaacattaggagccaagaaaaagccttcataaaagtcatgcaaattgccaatagtggcgccctcatcggtgcagcctggagcagtcaatgcaagttttgcattttcaaccaggtcctttttaccaacaatataaccaccggtcttagctagaccaccaccagcattcttaatcagcgatcctgccattaagtcagcaccatactcagttggctcatgtttttccgaaaattcgccataacaattgtcaataaagacaatactcttagggctgacccgtttaacaaaggcaatcatgtccttaatctgatcaactgtaaaggtctttctggtggagtagccacgtgaacgttgaatggcaacgatcttaggctgatcacgtttaagaaccttttcagcctcgtcataatcaactaacccatcatcggttaacggcacatatgaaaaatgcacgccgcgctcgactaaagtaccacgcttatcatcagtcaagccaatcactttttgcaaagtatcgtaaggctgtccagttaaataagttagcgtatcgccgtatttcaagttacctgctagagctacaaacaaggtgtgagtacctgaaacaaattgaggccgaactaccgcatcttcagtttgaaaaacttgagcatagatcttatctagcttatctcttcccatatcatcgtcgccatagccattagccccatttaaatcggcttcagcgacatcattagcttggtaagccgccaaaactttagccgtattatagacaatttgatcttcaatctcaaccagtttaggtgcgatctgttgatcaacttctttaacaattttttgtaatttttctggcaaattattcatttttccattccttgactttcttcaatatcttttgttcgcaacccggatcatctaacggatcaaaccaaactactggtaatttatttctaaaataagtcaattgacgtttagcatagcggcgcgaagctgtctttaaatcttcaatgcgatgctctagcgtctcttgcccttcaaaataagggaaaaattccttatacgcaattgcttgcaagacctgatactctcgtgctcgattttgataaataaattttgcttcatcgagcatcccttgctccatcatcttatgaacacgcaaattaatcctgcgatatatctcttgacggtcagaattcaagccaataatcaagtaatcataacggggctcgatctgcttttgttgctctgaaaactttttgcctgtacgctcaatcacagtcaatgctcgcatagttctgcgactattggctactggtattttttctgccgccttaggatcttgctcattcaagacctgccacaatttttctgcgcctttttccttgaggtagttttcccacttttgcgaaacgctacgctcttctggagttttctcgcctagctgcatcttattcaataaagcattaacataaaaacctgtcccgcctgcaataattggtaacttacctttttggctaatctcttcaatcgcttttgttgcttgatccacaaaatctttaactgaatactcgtcaaaaacggattgcgtatcaactaagtagtgtttcacttgcgcttgttcttctgcagttgcctttgcagttcccactgccacttcttggtaaacctgcatggaatcgccagaaataatctcgccgttcaaccttttagctaaatcaatcgccaagtctgtcttaccaatagctgttggtcctacaatcgctagtacctttttcatccccatcacctttcttaattttgatacaaaaaaagagcgcattagagttaccccctccaaatgcgtcttcttttcatttaatattttgacttcttagttcgaccatcccaagcttcaaagccatctttaagccaatggatagaaacaaaaccctttttctttaaaaaacgggcagctctcaaagtaatggtctttgaatctgagtaaagataaactggcaagtcgcttctaagctcagtatattgatacttaagcatggtatatggcaagttgcgagcgccatcaatatgcttgcgtttaaacggttctttttcacgcagatcaataatttgtgccttacgcatgccttctttaaattcttcattagtcaattcgccaccaattgatttagcttgaattttattccaagcccagataccaaccatgactaaaataatgactaataaaactaaatctaagacaattaaaaaactcgacataaactaaatctgccctttcataaaaacttacatctattatgataccgctaaactaatttactggctatcatttttcggatctttaagcgcctttttttgttcatttttgacttcaattcgatgttctcgactcaaaatcatcttggcaatcaaataatcatgttggtcaatcagaccggcacgattgatattgtcgagctctaaagccattaattcaatatcccaaattcttttgccaacatgaaccaaaattccgtatttttctaataattgttgtacatcgtagagagttttcattagaaattaattatcattcctgttctaaccgtccaaacaacatatacgactaacactgcagcagccaatacgcgccacttaggattgtaggtcttcattacacgatcgcccaagataatcgctaataagaagccggcaattaagccaccaatatgaccccagatatcaattccaggcacaaaaatatcaagcgctaagttaatcaatgctaagacaaaggcttgtcgacctaaaaaagcaatcattggattatgcaaattgcgcaagccaatggcagtcatggctccaaacaaaccaaataaggctgttgaggcaccagcacttaagccgcgatcagcactgaaagccaagctcattagattgccgccgaccccagctaaaagataagttactaaaaagcgcacatgtcccattaatggctccatatactgccccatgtagtaaataataatggcattagaaaccaaatgcatgatgccaatatgcaaaaactgggccgtaaataggcgccaccattggtgtccagccaccacggcaaaattattcatggctcccattttcatcaagacattggtattctctgagccacctaaaaacacttcaactaaaaagattattaataaaactactaaaattcctaaagtcacaaatgattgtgagaggttaatttttcgttgagtattcatttaatcccccttatcttcgtcattgtgactattttaataaattttatcaggagtaacaattgtttgaaccggaatatcggttttttcgataggccaaatgctagtatcgaacgtcatcttgctattggctaaagcaacagttttaggatcatgcttagccaaaaagcgatcataataacctccaccaaagccaagtcgaacatgcgaatctaaggcaaaggctaaacctggcacaatgactaaatccaaatcattattgattttcgcatcttcatcggcgacttcttccacaccgaatttagattttaccaatttgctcatatacgtatagcgtaaaaagtctaaagtatgattttgatcgcctcgtgcctttgccagataaacttcttttcctttatcccacaaacgagcaattaattcagaagtatctacttctagtggtaaagaagcagttaccccaatcgtctgacttcttctaattagatctgtagacattaatttctctaataaaatcgcatcttctgctcttttttctttagtattggcaaattcttttaatttactgatttgttcttttcttaattctgatttttccatctttttgtccaaaaaacaaaaaatagcaggcacgtaacctgctatcttggtttattacttagtttcacggtgaagtgttgcgcgtctttcaactgggcaatacttctttaaggataaacgttccggatgcttacgcttgttcttcttagataagtaacttctatcgccacattcggtgcattctaaaatgatgttatctgccatttttttcaccacctacacttttattctgactgtactagaatagcatttttcaagctgtttgaccagtattattctttattttgttgaatgaagtttgaaataatcttgtaccattgctttggcaacttgcaatgtgtatgttccttcaccatcagggtctaatcctgggaaaacaaccgccactgctaattttggatttttcgatggggcatagccaataaaggttgcattaatcaattcgatattgtgctttctattagggtgttcagcatcatagtagaaagtttgtgcagtaccagtcttaccagaaattgatggcttaacatttttcaatgggtgagcagttccccaaccatttgtaccgtgaacaacacgatagaaccctgtttgaaccacattaagttccgcaagcgtccaaggaattacttgttggacatttggcttcttattgtagctaatgtaaatcttcttgccatttttgctagttttaccaactgattgcacaatataaggttgcaatctcttaccaccattagcaatagttgacacatattgggctagttgaattggtgtataagcatcatagttaccataagctaggtcaagtacagaaccggaaagaatattacccttgtcattaaatgacttaccttcaattcctgacacttcaccaggtaggtcaacgcctgtcttttgacctaagccaaacatagcaaaattacgccgtaaaatgtcaaaggcatcgtttggcatatgaatgtagctcttcggtacataactagccttaacccatttcattgctaagtacatcatgtaaatattactggagacttccaacgctgtttcagcatccaatgaactgaaagtaccaactggataaactgactttttaactggtgaacctggcaaataaattgccgtatcaggcaaagtattgttttcgggagtaataaccttattaattaatccaccaccaacagtagcccccttaacaactgatcccataacaaaggattggttaattacacctaaagcattatcagtcgttttaccagtgttcgtgtttcgattaatcccggctacagctagcaaagcaccagtctgaggattcatcgccacggcataggcaccattagagtatcttgctgcaccgttaccaacagctgtactgtaaacccgtttcaaagtagcctgtacttgcttttgatacttagcgtcaatcgttaacattaagctggcaccggcttgaccattataaacagtcttagtctgctggatattaccattcgatttagtaataacctggttagtcgacttagttcccttcaaaagtggctcatattctttttcaagataggaagtacctacccggtcgttacgtgagtaaccatttcttaagtagtactgcaagctatcacttggtaaaccagatttttcagttgaaaccgaaccaatgatactttgaatagatgaaccatttggataagatctttgccagtcagttccgatacccacaccaggaagctctgataagtgctcacctacttgggcaatttcacgatcggttaagcctttattcttgatataaatcgtggataaagtataagcccctgaaatcttattaaagattaaagccgctgttttttgccgagtggttagttgaggattcattttttcaacataagccaattccgcttgatagatttcagctgaagtcttcttattgccatcagcatcaatcttggctgacttcggcaaagcattagatatcttagtattattatcttcattagctaaataataatctgctgccatttgctttgtcggcttttcatcgctaatcttgatataattactcaaggcattagatatcttgtaaatatctgctgttgtagtcgaggcactcttagtataagtaatagcattggttgctttattacctactaaaacgcgtcccttagcgtcatacatgacaccacgtggcacttgatgcgaaacaacagttgaatcagttttttgcacttctgccttgaaacgtgaaccataaactagttgcaaataagccaattgcccaattaacatggcaaagaggactaaaattacccctagaatgattcgcattctaattggagttgaggaatgcttgtttgagccagtcccactattttttctaaaataattcacgtaaatcacctttattaaaactagatgtattttaacaaaaagtaaacatcaattctacaattcataagggagcttatataatttttaatgatgcttaaatttcttaactcacgacacattgcaattaatcgtaaaaatatttttttctggcttagttttttgctaccggctttgattttcttgagttactttttctacagcaaaaatggagtgctcactgtcgacttaggtcaacaatatgttgattttcttgccttcttcaggcgaaatttgttctcccatcccttgcgcttaatctattccttttctaatggtttaggcggttcaatgctagcaactgatgcctattatctctgcagtcctttcaatctactcttatttttatttccgcaacattttttgccacaagcaattttaattattatcgcattaaaaattggagcggcgggactatcttcctactactattggaagcaaaaaatcactaatcacttttacgctttagcggctagttcggcttatgccctttcaggctacgttattggcaatcactataatctgatgtggcttgattctgtgattttgcttcctttattgattaatgccatcgaccgcttgctggcccaacgaaaaaataagttaattttaattacctttttgctttggttcactaatttttataccggatttatggcattagcctttggtttgctttatctgttaagcaaaattttcttcatcaataagcaggagcgcctacgccttaactggatttatttaagaaaaagtatcgctggttcatttttagatgcctttatgctcttccccgttctgattgaaatgttgcaaggcaaggctagttctactgcctcatggaatttgggctggcagttttctccagttgaacagctgactaagttagccgaaggggcctataactttcatgaaatgcaggaagggatgcccaacatttatctgacaatgcctttcttgttgctgacaattttatattttttaagcaaaaagattaactggcagcgtaaattagcaaacggaattttactcattttcttaattgcttctcttttttggacaccactggttttactctggcatttaggccaattccctgtctggtatcctggtcgtttcagctttgtgttgatcttttttgcgctaaatctaggcgttattgcattagaacaaaaagaacgtatagcttattggcagaccggacttctgactctattttctttaggtttaattgtttatatagtatttaatgcctcacattttgactttctaactgaagatgcgcagattgccacgggagcttttctagccctcggaatcttgtttattggctttatttatcatcaacacagttttgccgcgccatttttttatttagttatcgagcttgagttaatcgtcaacctagtactatctctaggcaatttagcttatcaaaaaaatagcgattatcagaactttaccactaatgtcagccaagcagtacaatacgcaaatcaacatgattctggattttaccgaactgaaaagaatttctatcgttctgatgatgatccttttagcgctggttattacggtttaagtaattttaattcgatttctgatcaaaaagtactcaacctgatcaacaatcttggatttctaaacaatagtaattcctacactaattttggcggaactactttgacagatgatttacttggaatcaaatattatcttttgcctaatgatgaaatcacaacgatcaagtctggtaagcaaatgaagtatgacaattccaaccaccgcgttgatgccagcgattatcatttgcaaaaacgcttttcccaactatatctagtgaaaaataatgccgctttgcccctactctttttaacatcacaaaaaacgcaaaaaatcaattttaactctctagatattactagtaatcaaaccaaattctttcaagcagttacaggggcaaaagtgcagctgtttaagcagatcaattggcctaaagcaaaattaattaatgtaactagtatgaaaaacgatcaactacaatataatcgtaaaaacaataagcaaatcgcacgcatcattttcaatttcaaaccacagactgatgattcttactacattgaaatgcccggtgagatcgatgataatgccatttcaatgacagttaatggtgctaatattaatctggcagtacgtgatcaaaatgcccgtctcattaatctaggtagccaccagcgtggtcaacggttgcaagttacttttgaactaaaaaaagataaactagaccttagtggcattcacttctggcgcttaaacacacaaaagctcgagcagattatacatcgttttaagcaaaaacaaccaaactttaaacaaacacctgctttgatcatcaaatctaatcatttcacaacgaagaagatgatgacattggcgtcaactattcctaataacattaactggttagttttagataatggcaaaataattaacaagaataaaaccttgttcatgaatgcttttttaaacttcaagttgaatccaggaaaacatcaaattacattaatttatgtaccatgggttcttctactggggatgttggttagcttaattagtttaacaattttattaatttgcaagaaaaaagccactgttagcgctaacagcaaaacttttactagacctactgtataaaaatataatacaatgtatacgttatcattcggataaattaatatagaaagaagatttacaacatggctcttaaataccaaattggtgttgatgcaggtggtacccactcaactgcaatcgcatatgacgaaactggcaaggaaatcggtcgtgcagaaggcggcccaggccaaattaacgctgactacgaaggcggaattaagaatatctctgacactatcaacgaattgatcgacaaggttgatggtgactgcatgcgcgttcttgttggtattgccggtctttcagttgtcggtaatgctccagaagttgccgcaactatttcatcaagaattaacaacttacctactcgtgctattactgattcacttttagcactttacgctggtcttgaaggtgatgacggtgccttagtaattgccggtactggctcagtttacaacggtttacaaaacggccacttaatcgcagttggtggctacggcaacatcttaggtgatgaaggctcaggttacgcaattgctcgttcagcaatgcaatctgctcttcttagctgggacaagcgtgaagacaacgctttgattcaaatgtttactaaattatttggcgttgaacacatggatgaatgtaacgctaaattctacaagatgtctaacccagaagttgcaggaatggctgttcacgttgcacaacttgctgatgaaggcagcgatgatgcaatcaaagttattaagaaacaagctcatctgttagcccgtgacatcatcatcggtcttgaccgttacgaagatcctaagccaatgaagattgctttaaccggttcagttttagctaacaacgaaatgcttagaggattggtagaagatgaagttaagaacaagtaccctgacgctatcttctcaatctccaacggtgaaaacgctcgtgccgtattgttcgacaagagtaaggactaccgttacttcactaaccacgaagaccgctaaattatcttttctgaatagttacaaaaagctcgaagttactacaatttgtagaagcttcgagctttgtttatgtttaaatttctgctggtgtattacgattaaagatataaatgtcacttttagttttttcccctagtattcataataagactacctataatcttttaaaattcttttaaaagcaaacgctaaaaattgatattttgtatttatagtatatagtactatatagataaagtaatacgttttgtgaatagaggttgtactatggctcaaattagtgtaaaaatcgatgataaattaaaaaaagaagctcaagatattcttgcttcatatggggttgacatatcaacaggaattagaatgtatttcaaagctattgttagaagtaatggcattcctttagaactaagacccatgacagaactagatgaagcgaactatgaagctgataatcacatttatcatggaagttatagctcttttgaagaatacaaaaaggccatgcggaaataatcatgcaagttaatcctaccaagcgctactaccgcgcttacaagagatatgaaagaaaacattatccaatggattatgttgatgattgtgttgaagcaatattaaccaatgacaaagaatttctagccaaacataaagatcaccctgtaggaaaaaatcgcaaaatgcacgttaatcgtcaatataatgacgattggctattgtactaccggattgataaagaaacacatgaactaatcctagttttggttgcattaggaacacatgatgaactagatcgatttgccaatatgtaatagcatgcgttgtattgaacaaaaacagattaatgcagagctcgaagttactacaatttgtagaagtttcgagctttattttgttccaatcacgctaatgatgttaataataatttttgcaactgtaacttagctgcatcttggttagcctgttctggttgctcatgattcaattgacaattctcaagataatcatcaatacccgctttgaaatctttcttcaactctgccagagaatttccttcataagaaataaaagtattttctagacctaagacttcgccaaataaagtatcattttcaacttcgataagtaccttggtaacctttataagttagtaggctcatagtcttatacctgccattcttaatccattcttcaacgttcttaattgatattgtttaagcatatttcgaggatgtggtttgtgtaattaaagattattcacctctcttatatattccatcactgtacaaaatttggaattcaaaatttaggcttgtctcccatcatttattacgcaaaaaatgtctaaattttttgaaaaaagttaatttttcaaatcaaaacaaaagaatcattacatgaactacatttttgatagcgaatacaatatttttcgcttcaaatacatagaatttctttcctttttaaaaaaattctttaaagaggctgtttccccttgtaaatacgcggattactgttaaaataagtaatcgtagtttatattaaaagaggtatttttcatggaaactatttctaagaaacaattagtagatcaaatcgctgcaaagactgatgctactaagacagacattaacactattttggacgcttacatcgacgttgttaagagcaatgttgctgaaggcaacaaggtacaattagttggcttcggtgccttcgaacttcgtcaccgtgctgctcgtaagggtcgtaacccacaaactggtaaggaaattgaaattgctgcatcaaacgttccagcattcaagccaggtaagagcttcaaggatgaagttaacaagtaataatttattattacaaaaaagaccgcgagttttctcgtggtcttttattttgcctcagaacctgccattaacaagacttttccctgctcagtttcgatcatctcgcaatctatgccaaagttttgcctaatcgtctgcgccgtaattacctcttctggcctgccctgcttttgaatcctgccttggttgagcaaaattacctgattactatattgcaaagcctgattcaaatcgtgcaaaatcatgcaaatcgtcaaattctgctttcgattcaattttttcactaaatccaaaaagcgatactgaaaatgcaaatccaagtatgttgttggttcatctagaaaaagatattccggctcttgcgccagtgctgtagcaagccacacacgctgctgctgaccgccagataattgcgctataaacttatctgccaaatcagcaatctctagctcctgcataatctgttgaaggcgagcagatccattttcttcatcccccatcaaggaatgatacggcagacgccccattttaaccagttccttgacagttatctgatcatacaattgattctgctggtggacaattgctacctttttggcaaaatccttcgcagctagctgccagatatcttgcccatctagcgtaattgtccccgcagacggccttattgcccgtgtaagcaagcgaaacaaggttgacttgccagatccattaggaccaattaaagtcgtaatctggtgctcctgcaggctcagagagaattgattaaataattgttttgacccatatgaaaaatcaatctgcgacgctttaagcatttttctgcctcttccataaaattaaaatcataactggaccaccaacaatagccaaaataatattagccgcaatctcattcggtgctgtaatcacccggccgatggtgtcaacgaacaataaaaaccaagctccagcaaaaatcgaaaatggaatgattttttgataatcatatcccaaaagcaaacgagcaacctgtggcacaataattccgataaaagctaaaacaccaatgcaagccgttgttgttgcggccaaaaccactgcaattagcatcaagactaaacgcagggttttagcagaaacacctaaagacgtcagctcttcatcattgaccttcaagtaattagcccaattcataaaacaaatcgcgaaaatcagccctactacgccaataatcaataaatacatcgtcgatccccaactacttgtggccaggctgctgccactattttgactattagtgaaaacttcctgcatccccgtgaacactgcattcaatgccactccgatgataattaactgataaggcgtcatctttttttggaataataaaagaagcccaaacgctagcagtccgccaataatcgcgaaaataattttaccaaagaaaatttctggcaaaataataaccgctagcaattgacataaactggctgcactagagatccccataattccaggttctgcaatcggattgcgcaaagttgcctgaaaaaaggcaccactaacagagaggctagctcctgctactagtgccgaaataatccgcgggacacggatattaaacaaaatattcaattggctgttagtcatcttttgcattgaaaaattgcttgctccgtgagttaatgcaaagaaaatcgtactgattaacaaaactgctaaaatcaagtttatccaaattacctttttcttcattttgatcactttccagggtacaaccagttgcttaatttattcaatgcttgagaaacattcatgttagctgaagcattaaagtctggttgctgtaggtcataaactctgcctgtctttacggctttcatcgtcttccaaacagaatttttcttaaactcttgcttaaattgtggcaaagttacatttggtaaagcatgttctaatcgcaaaatgacatctggatttttagtagctagcgagtcattacttggtgacaaataaatctgactatcagagtgatagatattttccccaccagctattctgaccaaatcacctaaatatgatcgattagttagaatcatgtaattagcgccaggcaagcccatcaagatcaatactctaggcttacgaccgtgaacacgtgctttagcctttttaacggcttttttgattaagccaatctgataatcagcctgtctctgccggtaatactgcttgcctaatgaactcagtgtagcttcaaggtcagctactgaatccagcttcaaatatgtaactttaacgccttgttctttaaatgattgatcatactgatcttttaaagttgagactgcatagacacgagtgggattcaaagaagcaatcttttcaacacttggcttcattggactcccaatcttgggcaccttttgatagcgtgctggtaacttagcctgcgtctttggaacccctgctaaattaacgttcaatttatcaaaaatttcagtaatcgctgcacttgtggcaacaatcttttcattattggcaactttttgatcaatcaatcgtttagcaccaattgccactccgacgattgctactaaaaatataattaaaccaataattaatcctttacgttttttcatttactttttctttccttggcatttacgacaatcaaaacagcaacgccaattaaaattaacgaactaagcactccagccaaaataacataataaaaatttcgctgcctttgttgattagcacgttgattgcgtgcattctgcgctatttgcctgttagctattgccgcttgcttcttttgtgccaattgctccttaggcttaacactcttgtttttcacctgtggcgcgctgcgttttatcgcactttccgcatgacttgctcgctcttttttatttgttaacttaggcaactgtgtagtgtcaaaagcaaaagtaatattgtgtgttgcttggtaaacatgtggcacatctattttaatttgactagaaatatcacgttttaaattattagtgcgaaaactatagcgataatcatagtcactgccatgccgcgtttttactacgtttagcggtgcttgtccatcaatcgttaacacctgaaccggatagggacttagatctttcttagtgcgaatcgtcatcgttaccaggtactgattgtcgtctaccacaacctgagcaggacgcgcatagtagccatcagccatcgaggtctgatgcgtgccatacttgtaagtgcgataactcacgctttgtgcactaacagtcacaccaaaaataaacaaacaagttagcaacaagaaaggaaaagagataattttagctatatttttcattatttctttctcttcaaaattttatttcttaagtaaaaggccaaaccaataattgcagcatcaaatgctaaaaagcctgcgatcacaggcaaaaatggatattccaccgctgcaatcgtcgccatctttttcttcttgggtgtcatctttgccccaggttttacactagagtttgaagaagactgctgctttttaactggctttgactgcggttgagcgctacttgtagcattttttgcatctttactactgtcgtcattagctgcagtaatagcatcactagtactacttgaatcagtgctactatttgcttcggttaatgccttgcttacagtcgaactgtgcgccacattttttacaccaaaagcaaaccagaccttaaacaaacgatcatgaatattggcaattggtacgctcaagcgcagactcccctgagcctgcttctttaactgatttagcgacttgaagtggacctgataagtccagatatccttgccagcttgtttggtaaaacgcaggtttgaaattgaaccaattcccagtgaaaccggctgaaatttggtcaccatcccatgctttacctcaacttttaaggtcataacatagccctgctttactttttcaatcctggcatgatgcgtgtaaaaattatttgctgcagaaacgccactgcgatccgccttatagaccgcataattgatattttgaacctttttatctgcgctgaccgtgtgtacttttcttactaacttttttgacgctctttttactagccttcttttgcttcttgtcggtctttttcttgctagtagttaaaccgctaaccttgtcatacttcacccaagcttgttcggtcatcttaccaccaaagtcaatagtgacttgcatcttgacccaaccattatttttgaaagcttttcctgcaaaaacaaagtcaaaactagatttgtcggcggaaacattttcctttttaccgctaacgccattaatcttgagggattttacaatcttatttacgttttgccccttgcccattggactatttttaccatcgacatggattgtcatcttagtcacatgcttttgactaactgttaattgcaccttatctcccacaaaaccttgagccattgacttagcatggctgcggtgatttttactgtatttgtaaaccgtcattcccactgtcttttgactttgttcagcggccattacaaccggattagtttgcataaatgccactccaggtgccattaaagtcattgcgaccgaactacttgcgattaacttaagtaactttttattcattctaatatccttctttttactattaatactattagtcttttctattataaagttcttaaaataactatgcaatcggtttcaagatgatattttagagactgtaaaatagtttgtgtaaggatgaatgattccttaaatttatttctttaaacattagaaaaaggagttcctttctcgtatgattggtttgaacaaaaaaacacatacagaaagaagaactccttcatgaatgattttaccaaagattttgctcaagctctattcaatccagacaaaataaatgatttattgcgcaaagagctacaacaggctgttaataacttgttagaagctgaattgactgcctttctgggctatgatccctatgccagaaatggctggaatactggcaactctagaaatggtgcttatttccgcaaagttgatacgcaatttggcccaattgaagtgcaagtgcctcgggatcgcaacggtcaatttcatcagcacacgctgcctggctacaagcagcactcggatatcttggaaagcatgattatcaagctttactccaagggcgtgaccaccagggaaatagccgatctaattgaaaagatgtatggcagccattacagtccagctcaggtatcaaatatttccaagcagatgattccaaaggttgaggcttaccacaaacgcaagctaagcgacaagtttttctgcgtctatttggatgcgacataccttcctttgcgccgagaaacatttgagcgtgaagcagtctatattgccattggcatcaagcctaatgggcacaaggaggtcattgactactgcattgcgcctagcgagaacattgaagtctggacagatatgcttcaaaacatgaaatcccgaggcttaaagcaagttgagctttttctttctgatggtgttgttggcatgaaaacagccttggccaggacttatcctaaagctcattttcaacgctgtttggttcatgtcatgcgcaatatctgcgctaaagtacgcgtcgacgatcgtgaaaagatcatgaacgaattcaaacaggtgcatcaacagacaaacaaagaagaagccacagctgtcctgcatgacttctataccaaatggggcaaggtttacagccatgttatcagaagcttgaaagacatagaaccagatctgctggtcttttataactatcccaagcagatcagagcttcaatttattcgactaacatgattgaatcatttaacaatgtgatcaagcgcaaagctaagcctaaggcagagtttccaactgaacagtcgcttgatgcttttattggcattcaggcaatgagctacaatgaccgttatttcaatcgaattcataaaggctttggtcaggttcaggacaccttagaatcctactttgattaaataaataattaaaaaatcaatttacgagaaagatctatttacacaaaagatttgacagtttcatattttattcagtttattatgctcataaaaaaataaaataacaaaaaatatattgatttataacatttatttgattataatgtaagcgatatctaaaattcgtgggaggaaacttttatgagaaaaaatactaaaatcattttaacatcacttgctttactcgcaagcgctagtgttttggcaccatcagctgtagtgtctgcagctgatcaacctgctactaatgttgctgcaactactgctactagtcaaaacagcgacttgcaaactatcactatgactattaccaaaactggcagcactaccccatcagaagctgctatgttcttgggcaactctgctcaagttaatgttaaagacggtaaagttaccgaagtaattattcacgttgatggctctaaagcaccaatgaccaaaggtcaagacatgtctaagatggttgctagcctaacattgaatggtgtagccggcaagcaagaaaatgttgctaaagacggctcatcccttgactatgttttctcagcagatgcttataaagaaggcgctggcagcttagaattcggtcttaacgttatgggcaagaccatgaacgaaaaggctgatattactttaggtaaggtcgctgaagacactgctaataaagatgccaatactacatctgacaagactcaaactgatgccgctgctgctaaaaagacagctgccaagaaagctaaggccgttaagcggactctgaagcacaatgcttatgtctacaagaagaacggcaagcgtgctaataagaaagttttgaagaaaggtcaccgcgttaacacttatggtcgcgcaattaaattacacggcaagactttctatcgtatttctaagaacacttacgttaaaaaagctaacttttaactaaaaatttatttcaagaaaataaaaagacgggcattggctcgtcttttttgtttggattgttatttgagagaaaatttctatttaagcaaaaatatccttaaaatcagctaccacgtctttattctttctgccaggaataacagcgtaaatcacagtggagatgcttgtcggagtatcaaaggcctcctgccacatttttgcgacttcttttgcgttaaagccaaaaacgcctgcaccccagcctttgaccacttgatttatcttagtaaagactaatgatagaggttgagcaactgctttatggcgactcaacaattctctaatcttgtcataaagcttggctttacggtcgtctcccggctttgcttgccagttttcgcccgttttccagaaggtaaagcctaggaaattgctcttcgttggtctaactactttagttttagtagtgttaacttttaagaacagttttctttctagccatgatgtaattgacttcatcacgcgcttagccgacttaccactcttgacgaagatattgcagtcatcgacatagcgaacaaagcgcaagcctctttgttccaattccttgtccattttatctaaatagatattggataggattggcgagagcggtccaccttgcggtacgccaagctttcattggactagatgaatgtcatgcccgacacacttcaaaaagccacgctgttgagcgtggctttatatattttttctattttccactcaaattaagagctatttgagaaatcaaagtatccatgaaatacataccgaaaaagacaaataatgccacaattaagatcttccatgaaatctttgataaatccttcaatctatgagttactgaaattccggcaaaggctaataccgatgtagttaatgataaaaaatctactgcattaattacacgaacacaatatggactaagcaaacagaaaactaatgaaacgatagacacccagcctagaatgggaaatcctctaacaatcttccacggaactcgtttcattaacatactgataataatgccaatcagagaaaacagccataatagacctaggccggcaaaagtatcaggtgtaattggggtgctcttaggattttttactaacttaatctactgaacaaataaaactaaactaacactaagcaataaaattaatgcatctctacctaatttataaaaattattttctctaatcatgttctgggtatacttctttctttttatcaagcaaactagtcaagtgaacatacatgaatctttgcaaaggaactgcgaggaaatacataatataagttccaataaaactagttaacaactgacttgctgccgcaaatgatagaatcgtctcactatgtttaggaaccagagctgctaaagctgaagaagctgcagtcatcatagaacttgatcctactccagaactcatcgcaacagcttgataactaaagcccatccccaaaagaactggtgctaaaattgagaagacaatcgaaccaaaaattgttccaattaagtaaatacctaggactcctcgacctttcggtgaatcaagtgtatatttttcactaatataggctagttctccttctctgcctaatcccaatgttgagccaatggcctcttgtcttaatcctagtaataaagctactggtagtccaaataaaattgtacctaaattacctaactcatgaatgagaaatacccaacctactgataaaatttcattaatcttaggtgcaacatttgctccataacgtgccattagtggcaacattattaaaatcatatattttccagcaaactttactcttttatcattgtagagttgcttaatcggctttaatggaagtaaataaataataatcgctaaaataactgcgaatactaatggtagaattgaaacttcaattttaccaattttgaaaacctgcatccctataaattccgcaatagtgtcaatcaatagcactaaaataattaatggaccataattttttaaagatttcatttttctgctcccattttatttaattgttcaagatattcctgatttgttctacgataagtcctgattttattaagattatttgatatttctaaaacactgttaaagataaattccgggaatatgtccagtacaaaaactggatcaactaatttaaaatcagagccatgaatggttccattccaaccaccatatccaatctgaatagttggcattagataacttacatcaccaatatcaccagctgccatggtatagcctcggttttcaatcaattctgaaatcttgtcattccttaaaaatacattttttactaaagcattcatgtctctattcgaccttaaagtcaaatagccaacctgtgtttctgacttaaaattaccgcctaaagctagggagcatccttctgctgcttgattgaattgcttcattagttgctgtgcatattcgacatcaaagtatcgtatatctgtccccatgctaacatgatcgggaattacattaatcgattctgtattatcacctatcatcactggattaaacctaatttgatttggattttttaattgttgacgtttgaaggccaaagcagtggtaaatagggtggctatactctgtgcatttaccccctcttcaggagcaaatgctgcatgactcgccttaccaaagaagtcaaagtattgaaaattaaatccagctaaatcacaattaatttcaatagtcctacgctcaaaatcttcacctatagcatgaactgatacacaataatcaatatcgtcaaatacgccaagtttgatggcttcctgcttacctccaaagtaagtaaaatcaccagctaacttatgctttttgcgccaattaagatctacaaattcttcggctggagtaaaaataaaagccaaattagtgccaaactcgttgagacgatcatttttcatcagttcatttatcaaagccaaggctgttgtcacctgagtatagtgaccacaagcttgcgccgctcctgtttcagggtcagcatccttatgacctggctgataaagtgaatccaattctgcaataatcccaatagtttttgggcaatgattatcaaacattaccttaagtcctgttttacaataatgttcgatttttatattagtagaaatcttagcaatttctgcttccactgccttagaagttttatactccttatagcctaattctggattgtgtagtaaataccctgctagttcctgtaattctgagtagtattcttgaaaacttgacatttcaatctccacttattcaaatcatcagtaatacgtttgatggcttaaatactacatcgtaattcatactaaatcaagaactatttttatattttgggttatgtttattcgcttttactggagaatttagtaaaatgtttactttaatttgaactacacaaacaagcatccccgcaagaaaaatctcacgaggatgctttatttgtgataaaaaatatttagaatttacgtaaaccatgttggtaaacttgtttatctttttgaccaactgcagcaacattttctaatggattctctcgtaaaactaagaaatccgcatattttcccacttcaagtgaaccatattcttgatcaaccttaagcaattcagcactacccaagccgcctgctcttaaagcttgataatttgtggctcctgctctaactaattccaccaactcatttggtgtatcagaaaagcgattgaagtatgttcctgcatcggtacccattgccaatttcaccccttccttaattgcatgtccaacatgattataaaagtcatcaactactgcacacatcttgcggtatgagaactcaggtacaacatcttttccatgaacgacgattgtccgacctgcagtcaatgttggtgacaaaaatgtaccttgttttttcatcaaagccaagtcattatcatctaaataaaaaccatgttctaccgaatcaactcctgcaacaaccgcataatgaataccgcgtctcccctcagcatgggcacaaaccgtcatatgcttagaatgagcttcttctactgccatcttcatttcttcaagagaaagttcagtatcatcaacttcatcacctaatgacataattccaccagttgccatcagcttaacatttttagcacccttggcaaactgttcacgcactgcccgacgcatgtcctctggaccgttaaccaaatgactagcattttgctctccatttaaccccaccttgaaatcaccatgtccgccgacaattgacattgccattccagttggcatcacttgaggaccttcaaaaggatactgcttgcgcatctgcactaatttacagtcaacatcaaaggatgtgccacaactacgaacataagtcacaccagtttgtaaagcttcacgcagatcccgcagtgctgcataagtagtcgaagcttcagtagtcggaaattttttcttcaagtcagaatcaagccccatgtgagtatgtgaattaatcaaaccgctcatcacatatttccctttaaggtcaacttgtttgtcaaaatctgctgtgcattttcccttaccttgatcggtcaatttacctgtttcatcatcaacgacaaaccaagcattatctactagattatcttcattaccaacgaataaattacaatttacaaaagctgttttagtcattatttttctcctaattattacttacagatgcatccttaaagctgaaattaccacccaagaattctacatttttaacacttggtcgaaccatccaagcttgaccatcatggaataatggcgtcaatccttgttgatcagttaaaacacgttctgcattatacaaatcttctaatcgcttagtaggatttaattccttatctgaattattcatatacttgtcaaaatctttgttagaccatttaccgaagttataactttgtcctgtcatcattgtgtgcaattgtgaattaggatctaaatagcccgaagtcaatccagtaaagactgcctcgaaatcaccattgagcattttcttaactctagtagtcttcggcatgcttctaacagttacatcaacttttttgccaaaggtatcttctaactggctttgcacaaactctaaaacctttttagaaacgtcatcatcgtcacccattaaggtaaaggccaacttattcttacccaattcttttaatgctctatcataaagtttcttagcgcctgcagggttataattcatatacttattagctggatttttgctttcaacatactggtcaaaattcttaccatcaacatattcatttggtccagcaaaagttcgagctacggtattagcaccaccaactgttttagccaattgagctcggttaagtgccattgaaactgctcttctaaaatcgacattagctagttctggatgcttggatacattgaaagtcaagtattcagttctatctagtttatagactgtataaccagattgacccttcagtctctttgaagcctgaacatcaagataggcaccatctaatttgttagcctgatacagattgtaatcagttgaaggcgtcttttgtacactataattaaccgtctgcaatttaactttatctttgtcccaatattgatcattcttttctaacttccagttaagacttgaaccagtccagcctttttgaacaaacggaccattgtaaaccatatacttagatgcagttccatattttttgccaaacttttcgactacgtgtttattttgcggattccaaccaactgacaaggctttaaaatacggtacgggatgtttcaagtgaactaccaattcatatttacccttagcttcaacacctaaagtcgacggagcttttttcccagctaaaacatcatctgcattaactacatttgaccactcattttgctgttgtgattgtgtcttaggatcaagtgtccgtcttaaagaataaacaaaatcttcagcggtcactggatcaccattagaccacttagcattctttcttaaagtaaaagtccaggtcaaaccatctttactctgattagttttagtagccacaccagatacaactttacccgctttattcagtctattgagcccttcaaaaacattagatgcctgttcactaccagttgtatctaccatctttgaaggatccatagtttggatttctgaggtagtcatccaggtcaattcttgtttaggtgctttagcaccagatttgcttgatgaacatgcagataaagtacttacacctaaaagtgctactacagtcgtgccaaataagtgcttcaatgtttttctcatttttatctctcccataagtcaaaaaattaacaacaagcttatgataataaaaaaacgccctactagatcaattgatctaatagggcgtcttcaacgcggtaccacctatttattcgtagaataatactcacaaaaattctacctcatgcacgtgcggctgattctatcaaaatcagcgatacgtcgccgctatagagggcggaccctgaaaatgctaatatcgcactttcagctcaaaggtgattttcacttaattcatcattatcttcttccaccaaccgaagactctctgcaaatcatttcttaagttactttccttatcaaagctcatttttttatttattgtaaacaataatatcatgtatttttaatatgtcaattatttttttatttttttcaattgttaaaaataaaatgatcaattgcctcggcaactgcaccatgattattatcagcctgagtaatgtaatcgcattgctctttcatagcaggattgacattagctacaccaacacccacaccagcagcctgaatcattgacaggtcattaaaattatcaccaatggcaattgtttcttcaatcggcaccctaagttgctcagccagcttcatcagtcccgcgcctttattgacacctttacggttaaattccaaatagcgattagacgaatacgaaatatccaattcttgcgtaattggtcctaattcagcggcgatccggtgcaaataattattatcaagactctcatagagcaccttggcaattttctgcccctccaaaaatgacaagtctttatcttcaatctctttaaactggtgtcgtcccgtcatataggcacgttcatcatcatcgatatgatacgtatataccatatcttgagtgtaaacatgcatggcaatatctagttcaaccccatgccgatataaccgatccgcaatttcattaggcaagccgtcaaaatacagcacgcgattattcttattttctgtaatgctggcaccattgaatgaaatcacatattcattagctgcctgctctaatcctatttcctttaaagtattttggacagaaacgtagcctcgtccagttgcaggaacaaattttacaccgtgagcaactgctttttgaatcgcttctctattttctactgagacatgcgtatctgcgctcaacaacgtttcatctaagtcacacgcaataattttatacatctagtcacctcttcatgcttagtttaccggagacacgcaagcctagcaaggcaacaaatcttgtaaaataacataatccgcctaagtataagtgattacaaaatagtaaaaatatttttcattacatagttataatagacatgcaagcctttaaataacagcgttcttgcgccttgaagacggtaaaaaatcatgctaagttagtgtcaaaagaatggggttaataagatgacagataagatatacactaattactttatcaaagatgaagattttgacaaaaaccacttccactacaagaaattaagcatccctcaaggtgtagaagctcagccattagctgtccctccagttcttgcactggataaggaaactgatactgatgtctggttcactcttgaatcaattgaaagcgaaagccaaatattgcctggagctaagaccaagacttggggttataacgctcctttgttaggtaaaaccatggtcttaaaacgtggccagcgagttcacgttaccttaaaaaatagtttaccagaactaacaacttatcactggcatggcatggaagttcctggtcctattactgatggtggctgtcatgcccctgtttatccaggtgaagaaaagcaaatcgaattcactgttaatcaaccagctgccttaacatggcttcatgctcacccatgtccatccaccgctgcccaagtttggatgggattagctatgggcgtagtagtaacagatgaaaacgaagctaaactcccaattcctaaaaactatggcgttgacgagtttccagttattttgcaagaccgtactttccacaaagataatcaacttgactatcgcgctgattatgatgcaatgggcgtcttcggtgaaacaccattaatcaacggcacggttcgcccttatgttgatgtaacaacacaaaagattcgtttactattcttaggtgggtctaaccgtcgtgaatggcgcttgcactttgatgatgacctagttatgactcaaattgcaggtgacgattcatttttgcctcatccaatcaaaatgactaagatcttggtaacacctggtgaacggcttcaagttgtagttgacttcaaggattaccatgatggcgatgtcgttaacctttatactgatgatttcaaactaattgaatttagaattcacaagtttgcacctgacaacagtgttattcctgatacattattcaaaccagaaattcctgaaatcgctgaagatttgccgattcgtaaagtaactatggatgatcacaacaagataaacggcaagcaattcgcaatgcagcggatcgatatgaagcaacaagttagtcatgctgaatactgggacgtaactaataccaactctaaggaacacggtatgttgcacccattccatattcacggcacacactttacagtcgtttcacgtgatggcgaaaagccatttccaaatgaatatggttacaaagacaccattcctgtcagaccaggtgaaaccgtccgcttgcgtgtagaattcccacaaactggagtcttcatgtaccactgccacattattgaacacgaagatgccggaatgatggctcaaatcgaagtattcgaccctaaacacccaaagacatacaagttaatggatatgaagacattaaccgacgcctttgctaaagaaagaggcattaaacctgaagatgtgtggatgccaggaatggataccgaaggttgcggcatggaagttgacagcagttctggtgctagtcaaaaataaaggagcttcaaaatgtgctcaggaatgaataacttattttggaaaattatttgggtaattgtttacgccattactgcctactttacttttaccggcaaaatgatgatggcaatgtactggatggccggtgggatgttggctgaatcggttgtctcactcatttactactttgttaatcgacaaaaataaactttttctcactatttcttccgttactaactttttaactaagtaaaaaaatttatttgacaaaattaaaacgagatgataaattaatagcaataattaaaaaatcttgatgaatagagtaattatagctagctttcttacagagaattactggttggtgagaagtaaaagaaactacttaatgaagatggattcagaatgattatactagtgatatttagctagtatcggggttgctctcgttaacaatgcaagctattgttagatagctattgaggtcagttatgtaaatagctggcaaataaaggtggtaacacgaagcactcgtcctttgaggatgggtgctttttttgcatatgagagaaagaaaaatgagaaaaagaagacagcggaatattattattggcaccattgttagcttattgattatcgtagctggttacttcagcttcttttggacgccaaaaagcaacggtcaaaccaaagttagcgtaggaatcgttggtgccagcaaaggtgacattgcaatctggaaaagcgttgctcaaaccgtcaaacagaaatatgggattattttaaccactaaaagttttgatggttatgaccaacctgacaaggcacttaaatccggtgacgttgatctgaatgccttccagcactatgctttcctcaacgcctggaacaaagccaaccatggcggaattactgcaatcggtaaaacctatatctcacctattcgcttatattccaaaaaatatcatagcctaaatgcactacctgaaggagcaacaattgtggtccccagcgatcccaccaatgaatcgagagcactttttgttttgaaaaatgccgggttgatcaaattgaagaaaggcaaagtattggtctctgttgcagatattactgccaatcctaaccacttcaaaattaaagaagttgcatctgaacaaactagccgcgtgatcgatgatgttgatgccgctgtcgtcaacaatgactttgctggccctgcacatctaggtgacaagcaaactatctttgtcgaaccattgaacaaagactctgagcaatggatcaatattatttgcgcccgcactaaggataaaaataaaaagatttatcaagaaattgttaaagcataccagaccaaaaagaccaagcaaatttacaagaaatactacggcaacaagcaaattgccgcttgggatgtaaaactaaaataagcaataaataagacgagaactacaatgactgtaattctcgccttatttttttataatgactattttttatttcttcaattgcttcaagtgttctttgatcttatctgcagcagcttgcaacttttctttttcttcagaagtaagctttaattcaatttcttcctcaatgccgtcgcgaccaataatagctggataaccaatataagtcttgtattcaggattataaactgaaacaggacaatatagatgagcatcgctaaagactgcttgaactaaacgagtagcacaagtggcaatagcatagctagtatagccctttcccttagccacaataaaggaattcttatttgattgttcactaatcttttcttgttcttcatcaccaaacaattggaaagcaatcttgttgttaactcttaccgttgaccaggctgtaaattgtgaagaaccatgttcacctaaaacgaaaccttctacgttacgtggatcttgaccaagtttttcaccaattattctttgaactcttgcagtatcaaggaaagtaccagtaccaaagacgcgattcttctttaaaccagaagtttcttgcaaaatttgggtaattgcatcacatggattagaaatattgatcaaaacgccgtgaaagcctgattctttaatatctgccccaacttctttggcatttcttgcatttaattcaaactcaccaaagcggtcgcctgtcttaactgaagccgcaatatcaccaaaagcggtaataataatgtcagcatcttctaagccgtcccaatcttgctttcgcacattaacatagctatcatttctagccaaagtatcatgcaagtcattgtattcagcatttactttagcttcatttttatcaattaaaatcagttcgtcaaccatactgtgcgtaaataaagtataggcaacggttgcaccaacatggcccatgccaataataccaactgttctcattttaaaatcctttcaaaaaaacaaaaaggaagatagtcatagctaccctccctttttattattaggctttaacttcgttaattacaacgtcaaacttgccaccaggagtggtaattgatacggtttcacccttctttttgcccaataaagcttgagcaattggtgaatcgttagaaatcttgccattcaatggatctgattcatcactacctacaatagtgtaagtttctggatcatcagtaccaacttcagtataggtaattgttttaccaactgaaactacgttaggatcaacgctttctgcatcaacaacttgtgcatacttaagcatttcttcaacttgagcaattctatcctcaaggtgactttgttcatccttagctgcatcgtattcggagttttctgacaagtcaccgaaagaacgtgcaaccttgatacgttcaataacttctggacgcttaactaattttaagttctttaattctgcttgaagtttttctttaccttcagcagtcattggataagatttttcaggcatatttttaactcctcagaaattaattttctttatcttgcactgatcaataatattaatttacgtcaataatgtcaacctttaacgaactttaatcgcaagatcattttcaagagcagcaacaatcttgtccatcgcgttattgacaacatcgtcggttaaagtatcttttctgttcaagaaggttaagttgtaagcaatactcttcttaccaacatcaatgtgagcaccagcataaacatcgattaccttaagttcagttaagtacttaccagcattagatttaatgacgttttcaatttcttggttagtaactggcttatcaactaaaagtgaaaggtcacgttgaattgctgggaacttaggtgcaggcactgcagttacgcccttagttaacattggaataattgtatcgagatcaatttcgtagccataaagctcgctaccacgaagtgccttatcagcaatcgttacagcgtgagcaatcattccgatcatcccaacatattgcttatcaatgtagattcctgcagttctagttgggtgcatccccttaatgcctttagcctcataaaccactttttcaggatcaataccaattgcattgaacaaattggttaactgtcccttaacaaagtagaagtctaccttttgggttaaatgttgccaattttccgcaaaagtattgccagagtaaatagctgctaaatgttcatgctcgttgaatttaccaccatcatggtcataagttctgccttgttcaaataaagctaattgtgtttgctttctagcaaagttgtaactagcagcatctaccaatccagtcatcaaattctcacgcattgcagaacggcttgagttaagtggtgatttaacttcaactaattcttttggatccttagtgtaacgaacggccttttcaggtgaagtcaaggagtaagaaatagcttccatcaagccttgtccttcaacaattgccttcatgcggcgcatcatttcttctttttctgagtagccaccatgagtttctggcaaaacaggttgagtagattcaaggttgtcatagccataaagccggcctacttcttcaactaagtcggctgggattgaaatatcccatcttctatttggtacatggacagctaaattatcaccatcaacatctaccttaaagcaaagacggtcaaaaatctttacaatttcatcaactgataacttagtgcccaatactttattgaggtatgaagcagtagttttaaccacaactggttcacgcttttggtcagttgccttaagaataccttcatcaacagtagcgtcagcgtcatttctaagtaaaagcgctgccatgttaattgccttttcagtggcatcccagttaacgcctttttcatagcgacttgaagcttcggtccggttagcgtgacgaagtgctgcctttctgactaaagttggatcaaagatggctgattcaagaatgacatctgtagtttctgaagtgatttctgaatcaagtccacccatgacaccagccatcattactggctttttaccatcggtaatgatgatatctttagggtcaaggtcaacttctttttcattaagcaaagtaagcttctcacccttattagcaagtcttacttcaaactttccgttagcaaaagtcttagcgtcataagcatgcattggttgaccagttaacagcatgatatagttagtaacgtcaactacattgttaattggacgaatgcctgcattccaaagacgacgctgcaaccaaagtggtgagtcttgaatcttaatattctcgagcttacgtaagtaaaacttaggtgtaagcttttcatcaactttaacatcgagtgaatctgtccaggctggaccatcttcttttaagacaaccttttcttcaacctttggcttttggtcgataatagcaccgacttcataagcggcaccttccatgcctaaagtatcagcacggttaggagtaatgtcgaagttcaaaatgtaatcatccatgccaagtgcttcatatacatcttgaccaggtttaacttcggcatctgctgggaatacgtaaataccatcgacaaattcttgtggtaccacgctatcgctaaagccgatttcttgtaaaccacagatcatgccgtaactttccatgccacggattttgcccttcttaatcttttcattgccagcaatacgagcgccatgaagagcaacaatcacatcttcacctgcagctacattaggtgcaccacagacaatttgcaaaggttcgttttcaccaacatcaacgtgagttaagtgcaagtgagtaccttcaacgccttcacaatcaaggacacggccgacaactaacttcttcaagccatccattggatgaatacggtcaggaatttcaaccccgctacgagtaatttcttctgctaattcgtatggattttgaccatctaaatcaagaaaatattttagccaattgtatgaaactaacattaattatctttcctccttacggaattgttctaagaaacgtacgtcattggtgtagaagtcacgaatatcatcgataccgtatttcaaaatagcgaaacgatcaagaccaacaccgaaggcaaaaccgccgtaaacgcttgagtcaacacctgcattttccaaaacattagggtgaaccataccagcacctaatacttcaatccagccagtgtacttacaaatagggcagcctttaccattacagttaaagcaagatacatccatttcaactgatggttcagtgaatgggaagtaacttggacgaagacgggtttcgcgatcttggccaaaaacgtgcttggcaattaattccaaagtaccctttaaatcactcatagttacgttcttgtcaataaccaaaccttccatttgcatgaattggtgtgagtgagtcgcatcatcgtcatcacggcggtataccttacctggtcccaccatcttaagtggaccctttgagaagtcgtgcttttctaggactctagcttgatcacctgaggtctgacttctaagcaaatcttcatcatcaatgtagaaagtagcttgcatgtcacgagctgggtgatccttagggatattcatcatttcaaagcagtagtgatcagtttcaatttctggaccttgaactacttgatagcccataccaataaagtagctttcaagatcatctaaaataatgttgattgggtgctttgaaccaagatgtgcttcacgacctggcaaagtaacatcaatcttttcatcttcaagcttcttaactaacattgcatgaacaatgttttctttagcttcatctaattgagcattaaacaagtcacgtaattcgttaaccttttgaccaacttcacgtctattttctggcgcaacttcacgcattgagtgcaaaatcttagttaattcgcccttacgaccaacaagttcaactctgacatcattcaaagttttttcgtctttagccttgttgatttgcttaagcccttcttcatggagctcttttaacttatcaaataagtccattaaatctttcctttcaaaacaaaaaagccccgtccccaatagggacgaagcatcgcggtaccaccctagtttggacgtagcaacgcccacacttaagttttcgttaacggtgaaataccggaattgattagatcctactcccaagatgaaattcacagcgttctttctatcttctcttgcagcttttgaaagaagactctctgttcagaaaaaatatctgctactagtcttgatctcagtaattaattaatatgatatttcttttacctgtttcttgcaagctttttgtaaagatactgtttatatctcatattttttgaattttaggaagataaatatttcataaaaaataatttgttttttatttataaagatctctcacaaatagatataaagaagactgcacttatttttaaatttataaaacaacacaacattctagtagctattccatctcataatcttcttttctttagcttatgttccacctataagatcagaatttacggttacataagtaatctgtatatggattatgatttcgttttaattggctagcttatctaattgctgtaaaccactaatcagagttattaatacagataaaactaagcatacaatagctacgaaaaagattaaggaaggagatattcttactagtataccacttagcgttgccattaatggacctgtaattcttgtcagagacgttgaagtagcagttaccatgcctttatattggtcaggtgtcttagattgaataatggtaaagaaattagcttgagcccatacactaccaaatgatactattgcatatcccatggtaaatattaataaagatttaatggccagcataatagtgaatcctacagtaataattaatccaataactattaattgagtgcctagctttatttttttactaaagtgtagataaacaaagttacccagtatactagcaactgatgagatagtaaaaaatatactaatttcatttattgaagcacgtgtttgtacttttaataagaaagttaacatcggtattactacttgaaagccaacattggcagcaagaaaactaataattaaccatttgatatcatgttctttcaaaacaaattttaaaccttgtgataaggtttgctgtatactcttcttttttttatcattgttctcgttatttgtagtctcaatacctttaacaacataagtcaaatagccaaaactgatcgaatctagcatgaagccaccgagatagttaaagaggttaacaataatagctgctatacctggtccaaatgttttttgaattgaactaatcaggccaactgctccagaaatctttgataactcactttcagaaacagactccgaaattagaatctggtatccagtccaagacattaagtcaactgttccaattaaaaagatcatgaataaaaccaaagctattggaaaatcatgcaatattaataacggaatgatcaaaggcttcaagagtcgcggccttgaacaggtagagctcttcttgtctgacggagtagttggcatgaaagaggctatctgccagtcctatcctaaagcgcattttcaacgctgcttggtacacgtcatgcgtaatatcagtgccaaaatgcgggttgacgatcgaaaaaagcactggatgaattcaagcagattcatactcagtcaaacaaagaaatggctgtacaggtgctgcatgaattctatcaaaactgggaaaaagcctacaaaaacgtagttagagatcttagacaggttgagcctgatctgttaaccttttacaactatccgccagctattagagcttcaatttactcaactaacatgattgaatcctttaacaacaggcttaagcggaaaaccaagcctaaaacagaatttccaactgagcagtcgcttgacacctttattggagttcaggcaatggattacaatgaccgttactttaacaggattcataaaggatttgggcaagttcgagacaccctagaatcctattttgattaaaagataaataaaaaagtcaatcaacgagagagattatttacacaaacttcttgacagtctcctaatttccttaccaaagtatggcttcaattctttattataatcgtaagtaaaaaagctttcgcgattcaatttggtaatttcacgatccatccatttttgtaaggacttattgcccttctttaccgcaccagaaatatactggttaggtccaatcgtcttaatgccgacagtaaacttaggatttcgcttaacccaagcatacagataagaattatcatcggcccaagctgcaccacggccatttttaatcgcgttaaactgctgagttttagagtcaaacttaagcaagtttacgcctttttgtttagtaaaatagttctctgctgtcgtccctttagtaacgatcacgctttttcccttcaattgttttggactagttatcggagctgacttaggggaaatcaccccaaccgatactttcatataaggcttagtccaactagccacgcttttacgctctggtgtcaaagtgaagttagccaaaacaatatcagccttattagaattcaaggtatcaattcaattattggcattaacttgaataaacttaggttttacgcccaaatctttcgccactctgcgagctaggcgcacgtcatagccaacacgcttaccttgtgaattaacccagccataaggcggtagatcgccaaagacagccactcttaaatagccacgacgtttaattgaagatacattattttcattattccatctgtcgcctgaagcagtgccgttaattcctggtcgcgtaattccaaaataaccagcaattaccacaactaccgcaaagaggacagccatgatccaattaaaaatcttttttgccatcattcacacctaaaaatccatactctctaaaaattcttgtgcccgcttagtctgaggtttagtaaagaattctttgcctggtgtttcttccaaaatttttccgtcttctaaaaatagcaccttatcggcaattctcgcagcgaagttcatctcatgcgtaacaatgatcatcgtcatatgttcgttatcagataatctttgcatgatatctagcacgccgcgaaccatttcagggtcaagcgaagcagtaatctcatcaaagagcattacttcgggatgcataatcaaagcacgcacaatcgcaattctttgcttttgtccagctgataattcacgcggatatacttttgcataattagctaaaccgacttgctctaataacttaactgcttcttgtttaacttcagcttcatcacgtttttgaacttttaccggtgccaataaaatattttccatcacggataagttgggaaataagtcataactttgaaagaccatcccaatcttttggcgcaacaattgccattccttcggactaggatttatttttttaccgtgaaaataaattgcgccaccctcatattcttcaagcccattcaccgttctcagcaaagtactttttcctgaaccagaaggtcccaataaggtcaatacctcgcctttatttaagctaaagttgatatcaaacaaagtttgatgcttgccataaaatttatttaaatgctctactcttaaaacttcttctgtcatttcattcacctaattcttagcagttaatcgttttgcccatgcagacaagggataatccaaaataaaatacaagataaagataaagccatatacccaaaacacaccagctggatattgttgattatttgcttcaatgatttgttgaccgacattgattacttccatgatattgataatcattaataaagaagtggtcttaattactctagtagccaagttgattgttgctggtagttctaacttaactgcttgaggcaacaagacataacggaacagttgcaggcgatttagacccagtgctaggccagattcacgctgcgttttgggtactgattccaatgcaccacgaacaatatcgctaaactcagcagctacccacattgagaaagctaataccgccatccaagtagctggccaattgacgtgcaagcttcttggcaaaatataataaaccaaatacagtaaaactacggttggcacaattctgaagaattctaagtacaaccgcaaaacaaaacgcaatggacgattttttaaggttctcaaaataccaaaaattgttcctacagccaagccaattactagtgacaaagctgcaatccaaatcgaggtccatagccctgccatcaaacgggcaaagttacttccttcaaacaaaacattaatccccgaatgaagcataccgtactctcctctcaagccaagttaataataaaataattggaatcaaaataatcgcataagcaattaccagcatcaataaatattcatttgaatggtaatacatcccaatcaagtcaagggctgtattagttaactccggaattgcaattactgaaaaaatcgaagtttccttaattaaaaaaataatattggcggttaaagccggcatgcttaggctaaatccttgtggaaaaaccacatagcgagctaattgtaagttgttcattcctaatgctttaccgctattaatctgactagggcttacgccattaaaaccaccggtaaagccttcagccatatatgctccacctaaaaagattaagccaatgatgctgcagacctcagcggacatttttaagccaattactggaaaggcataatataaaaagaaaagttgaattaaaagcggtgtatttctagctaattcaacatatactgtcaaaatttggcttaatacaggcaccttaaagtattgcaccagactgacaataatccccacaataattgagcccacaatgccaactagtgaaagccataacgttagctcaaatccccgagcaaacacaggcaaggcttgttggataattgtccaattcattaaaaatcccccaatcacacaaaaaagagacccactctcataggtctctttaaacaataaaaaaagatctacgctacttcagttgacgtaaatctccttattttctaattaaagctatttaggcatacgcaaactgaattcttgagtattaaaagcaatgttagatacacaagaacaacagtcagtattaacatttcttatacttaaaaattccattttcgtactcctttcatcttgtcttattttaaataagcaacttacattaagtaatatactttttttcttacttaatgtcaataccctaagcccatttgtcagcccaattatgtacttggtcaaaaactggcttaagttcagcaccttttttagttaaaccatatgaaatgatgccggtattttgatcaacactacgcttgacgatatcttctttttctagttccttcaaacgttcaacgagtactcgatcactacatgcctcaatcgttcgtgctaaatctttaaaacgcatatcttgggtatcacaaagtgaactaataattaaaccattccactttttgccaataatcttaaaagcaccaacaaagtgacagcacaattcataatcttctggtttacaaggagctgcatcctttttttctttaacttcttgcatcgtaagtccctccataattatataatccctgtaaaaataatattatataaaatatttttcagtattactaacattattatagtaaatccgcttactaattacaagtgctaagcgaagcgataaatcataatcccggctgcgacagcggcattgagtgattcagcttgtcctttaattggaatatagagcttttcatcagccaaagaagcaatggttttgcttatgccatgcgcctcgttcccaataattaaggcaagttgtggcactttttcgaaatcaggcaattgcttagcagaacgatcaagcagcgatgcataaaccggaatagctgcatcctgaaaatcggtgatcacattagctagatcacgcttaatcaaatcgatatggaattgacttccttgcatggcacgttgcgttttaggattatacaggtcagcactctctggtgaaagaactaccccatcaaaaccagcagcatcagcagttctgataatcgtccccacattaccaggatcagccaagttatcaagcagcacccacttgccataattaaacggaaattcttttggttgatcaatttttaataccataaaaatttcttgagaattcttagtcgaacttaagtggcgagcaatcgctttgttaattaatacgacattcttcccacttaaatcaacttcatattcactatctgcttgatcaagtgcttcttcagtacctaagatatactgatattttttaccagctttaagtgcttcttcaaataagtgaaagccttcaattaaatataagccttcatcatcgcggtatttcttttgctttaacttcgctaatttcttaatcgttgcattattaactgaactaatttgttgcatatttttctcctttttgtattcaaaatctattataactgataatctattttgatcatgctaaaatcaaagttgaacttaatttaaataagggagataaaaatggaaacaagaaaattaatttgttcaggcttagttcaaggcgttggctttcgttggtcaaccatggcattagctaacaagatgggtattcctggcactgttaaaaataatgcagatggtaccgttacaatctatttacaagcagacagtgataaaatcgaccgctttattgaaaaactacctactgcatctggatttgcccaaattcaaaatattagtcaagaatcggttccaggtgtagaaaaaatgcatgattttcatgtattatattagagacatacatttttagatagaaattaagtggtgatttatttaaatgaaaaaaattaaaagatacgctggagtactggctttattagcagtagctactcttgtattaagtgcctgtggggcaacaactgatccacatgttgcaccgcacagcggtatttacggttgggtttaccaatggttaggccgacctttacaaaatatcatgattcaaaccgcgcacatgattggcggcgataatggtgctggttggggaatcgtgattattacggtagttgtacgtgtaatcttgatgccattgatgttagtacagcaaaacaagagtgtacgtcaacaggaaaaaatggctcgtctgcaaccgcaaatgaagttgattcaaaatgcaatgagacacaaggggatcacccctgaccaacaaatgactttatcaacttggcaaagagagctttactctaaaaaccaagtttcattaactggtggaatgggctgcttgccattaattattcagttaccaattatgtggggaatttatcaagcggtattctattcacctcaattggcacaatccaaattctttggtatttctctaagttccaaatctgttgttttagccattattgcgactgtctttaccgttattcaaggttatatctcactaattggtattccagaagaacaaaagaagaccatgcaatcaatgatgattgttaacccaattatgactttgttcttcagtttatccttctctggtgccttagctctttactgggctgctggtaacttagtaatgattgtccaacaagtaatcgttacctttgtccttacacctagtgttaagaagcatattgccgatgaattaaaagataagccaattgaaactgttgttactaaagaaaaagtggatgctttgtttaactccaatagcggtcaaagcaaggctacaactgaagctaagaaagaactacaccaagacttacgtaaccgtaataaaggtaagcaaaagcgtaaatagttatcagtcaggaggaaaatcctgacttttttattaggaggaaaatatgcatactcaagaaatattacaacttttagatgatcatgatattaactatcaagtattctctcatccagcagtttttacaactaaaaaggcagataaatacttagaagatgaagattttgctaaatgtaaaactctttttattaaaacccgtaacgccaaaaattattatctactaatgttacccgaagataaaaaaatcgattggcaaaaagctaaagctgaattactctcctctagtttaaccttcgctactgaagctgaactagaagaaaaactgcaagttaaaacaggggctgtttccccatttagcctgctcaatgatcaaagtaataaaattcccctgattgtcgatcaagcagcaatggaagaaaacaatttagttggtgtgcatcccaatgataataccaaaacaattagtcttacttggatcgatttagctagaattttaagttcctatggtcatttgtttgaagaaagatcattataaaaaacttcaacttaatcctttttctccataaaaactttattcaaaaaatctttttcaattggatacttcgtcaaataatcttgaacaatcttgttgattctttcctcagctaattcacatggttcttgatttgccagctggtgcaaattattcagtactaatttatacagaaattgccgtttttccttgataatcaacagcgagaagttatgggcagctcgtctttgaaaatatctaatttcatttagccattcttcaaattgacggagagttatcttttctttaaacacacgtgttaaaacaatctttttggctttgatgggcattaaaaagaaataattcgttgcaacaccaaatgacatttctttaataatcagtccgatccctgcttcaccatgagcctcagtatatccctcatatggctcaagatagttttgcttaatatgccgcatgcgcgctttcacatcaccgcggtgaattactcgcccatcttttaattgatatttttcatttagaaactgcctttgatgaattgttcgtggattaagatttctggtgaaatttttaccattctcaataagagctgtttctgcaagggctactttgaagctttgttcaaacaattgcagactgatcatcatcacattttttatatgttgatctaggcaatagaaatcataaatttcttcaaacgttgtttttcgcttaggtttaatgaaatcatcgtcattagtttctatgaaaaaatgatcaatattttgatacataatttcatgatagccataattagcagttacccgatcaaaaagcttttcatcattaataattaaccctatgtcacgccaaaaatcgattctaatttcagaaagtaaatcattaatcattgagctgtctcctatttcatcgaactctccaacaatcgtaaatcgtagtattaccactaatctattcagcaatgtataaacatcaacaccaagaacttttatcctcttcctataatctaataaaaacgctatccaaatggataacgtcttcactcccaattaatctgattcttcagcggcccgtgtagcggcattttcaatagttttaacaggatttaatctaacacgaaagttaaagtagcccacgtgctcatcatcttcaaaaccatactcactataatcaccccaggaaacatagttagatgttcccttaattctgtaaaatagttgggcaatatcaccactgcctagaacaactggatcaaccgctctaatcttttgtcctttcttaacggattgcttagttttctttaatttagaattatagatgtacaaatctgtctgcggaacaatcgtagttgcaccgccatcacgaaatgccggattgccattgatgcgaccaacattcattgccttgatataagcacctctgccaatgtaataatagtcttgacctttaatcttataattcttaattgcatatgatttactaccacttaagtttgtgtaatagtaatcgtcagtttgtgtcttagtgcgacgcttaccagcataatttataattgagtatttaggaaaaacctgttgtccattaaagctaatacgcttaccattcttattgtaaatagcagtgttagcattcagcttcaaaacgcctttgccattcatggtattaacgttattagactttaaatacgtcccatcacctaaattaaaatatgaatcaggataagtagtccaacttttaccagcatatttaatcttgctacctttagttaaataagccttgccaccgcgataagttgataaacgattacccttgctattgtaaatataggtgtttttaataattccgatctcattattattccagttatagctaccaaccgatttcatgttgacataaccaccatcacctaaatctgcataggtttcaccattaacaatagcttgtggcatcccattaagattaataaaagcactgaccctgggtccctgaataacaattggttgaccataaaaattgatcggtttcttaaaatttatccgatcttggctacctagctctttaccattcttattatacaaagttggattggtatagctcttaacagttgtaatcttattcttcagagtacttgcccgaactaccggtgttaattgattttgacccgctaaagctgcaggaacaaaaagcgcagttccagccacaatacttaatacaattctcttaagtttcataatttatgacctctcttaattattttacccttgcatatacattatagtccctttaatataagtcactgataaatcatgctttgcctaccgtttagattcaaaatcaaatctgcattatcttccattacttgccttcttttaccgaaaagcatcaaaattgagaatagcaatggaacgccaacaattaatacagtataaatataatcagtgatttcgccattccaagaccagccagcagaattccaaccagattgcaaatcagaaatataatccattaaaaagtgatagatcatcggcaaccatagttttcctgtatagagatacaattctgcccagataaaggcgctccccattacgccaataacttgtgcaattgttgcagtaaaactttctccatgccagcaaaaattacttaaatgactaaggccaaacaaaattgctgaaccatagattgcaacagggatgcgatactttggaaatctattaaaaccagctaaaaaaattacgatcaataaatagcgttcggtttcttccaaaattccgggctcaatggctgcagttaaattaggaattgagaatttaaatgaaccaatgtcaacaccaaagaatactgtccaaattgctttatcatagttgataaactcattgtaaaacaaatcaatggttgccatgatcaataaagccagcaagatcttcttctgaaagcttggacttttaataaattttaagtttggattgaagtgatagccccaagctttaactaagaaacaagtcatcgttaataaagcaatagctgcgattacaccttgataggtaagtgaatgaagccagcgaaaatctggatttattgctaaattttgtgcatcaccgtactgaatatcaagaaagtaaatagttagcaagcgtaaaaaccaatttttaatcggtccaacatgtacaactgcaattggaactagcaagaaaatataaaccgcccatagcagtaatactaatagaatctcgatagccggcaggttttttagcaaaaaattcccagtgatatgccaaatttggcaaaaattgaaaggaaaaattactatggtcagccagcgaacaatttgagtattagtcttgctggaatcctttttaaattgcacgtaaaagttcaatcccatgatcgccgtactaaaagctagattgaacaaatcccctataaaataaaaatgattattccgctgagaaaaagtataactaatcatcaagagaaaccagataatcaattgatagttaaaaactttctgccagaatttccttgaaaaaatgcgttctttcattatgtcacatccctcgtattatataaattgtaattagtcatattgtgataattaatcaaattagtatttgctttttgatcttcacatgttagcctctaattgtcattggctttggtcaactggtctaggttatcacctcctgcagttttgtctgctttataagtctgccacccagacagttcctttatgctctaactcacatgctgtattgattgcttctttttgctagtccttgagcaattgggattaggtgcagctttcaaagaagcaaccagtgaatacttatactggcgagattgaacttaagaactgtaattaggggttaacatgtgaagatcaaaatctatgatcagaaatttgaaagaaaggaggccatttccaatgaaattatttgtcggtattgatgttagttctaaagatttacaggtcgttgcacttgattcagaagatcaaaacaaacgcttaattaacgatagctttgtcaatgatctttatggtgctagtgaactgaaaaaacaaattttagatctagctcaaaataaacactatgatcaaatcattattggcatggaagctacatctatttacagttttcatcctgcttactttttccaaaatgacgaagatttacaaaagctcaatgtagagactgatgtaattaaccccaaagaaaccagcaggtttcataaagtctttgaagaaagtaaaactgatcctctcgatgcttattacattgctttgtatctaagctttggacattatcgagtaagcattgccagacaagacaactatcttgctttagagcgtttaacgcgtaccagatatgaattagttcaagaactgactcgtaccaaacagcacttcattgaagctttatattatcgggttaataaactaatcactgtcgataaagataagattaatactcctcttttcggtgctacaatgatgtctattgtaaccgatagtaaaactctggatgagatcgcggatatgcctaccgaagacttaatttcttacttacaggttaaaggcagaggacgcttttccgatccagataccttggctaaagcaattaagaaagctgttagaggttcatatcgcttaggcaaagtaatgactgattcaattgatgcagtgctttctgttcattacaacatgattcaaagctttaatgaatctattaaagatctagaaaaagcaattgatcgtatcgttgatgcattaccagaaagcaaaattctggaatcaattcccggtattggcaaaacctatacagctggtattatcgctgagatcggaagtatcgatcgctttgataaagaagaacagctggctaagtatgccggcctaacctggaatcaatatcaatcgggagatcacagcaacgaacatactccaatggccaggactggaaacagatatctaagatattacttgattgaagctgccaatctagcaagattacatgatcctgttttcaaaaaatattaccaaaagaagtatgatgaagctgtctactcgccgcataaacgtgcttgcacattaactgcaagaaaattagtacgagttatctttaaattgctcaaagatgacaaactgtacaggacaccgaggtcttaatttcaaaaattggtctaaatttaaaagtaaacaaaagtttaacatttaaaaaatcaacctttaccaaggcttagtttcatatactcaaatttatgatcaaaaagaacaaatatcatcgcctttcatttgacttattaccgagactgtaaaatagtttgtgtaaggatgaatgattccttaaatttatttctttaaacattagaaaaaggagttcctttctcgtatgattggtttgaacaaaaaaacacatacagaaagaagaactccttcatgaatgattttaccaaagattttgctcaagctctattcaatccagacaaaataaatgatttattgcgcaaagagctacaacaggctgttaataacttgttagaagctgaattgactgcctttctgggctatgatccctatgccagaaatggctggaatactggcaactctagaaatggtgcttatttccgcaaagttgatacgcaatttggcccaattgaagtgcaagtgcctcgggatcgcaacggtcaatttcatcagcacacgctgcctggctacaagcagcactcggatatcttggaaagcatgattatcaagctttactccaagggcgtgaccaccagggaaatagccgatctaattgaaaagatgtatggcagccattacagtccagctcaggtatcaaatatttccaagcagatgattccaaaggttgaggcttaccacaaacgcaagctaagcgacaagtttttctgcgtctatttggatgcgacataccttcctttgcgccgagaaacatttgagcgtgaagcagtctatattgccattggcatcaagcctaatgggcacaaggaggtcattgactactgcattgcgcctagcgagaacattgaagtctggacagatatgcttcaaaacatgaaatcccgaggcttaaagcaagttgagctttttctttctgatggtgttgttggcatgaaaacagccttggccaggacttatcctaaagctcattttcaacgctgtttggttcatgtcatgcgcaatatctgcgctaaagtacgcgtcgacgatcgtgaaaagatcatgaacgaattcaaacaggtgcatcaacagacaaacaaagaagaagccacagctgtcctgcatgacttctataccaaatggggcaaggtttacagccatgttatcagaagcttgaaagacatagaaccagatctgctggtcttttataactatcccaagcagatcagagcttcaatttattcgactaacatgattgaatcatttaacaatgtgatcaagcgcaaagctaagcctaaggcagagtttccaactgaacagtcgcttgatgcttttattggcattcaggcaatgagctacaatgaccgttatttcaatcgaattcataaaggctttggtcaggttcaggacaccttagaatcctactttgattaaataaataattaaaaaatcaatttacgagaaagatctatttacacaaaagatttgacagtttcttattaccacatgacttaagtttaaatatttttagctaattaaatcgcttaaattaataacaattataattcctgaattgtcaaattaagtgcaacagttaggttatgaagagatatattgcttgaagagttcctctgctgtgtgatattggaggattcggcgatatttgtggttaatggcatcagttgcctgttgaacataagcttttgacttgtctttcatgctcttgcccttagggaagaattgacgcaaaagaccattgcagttctcattggtgcctctttcccatggagaatatgggtgagcaaagtaaatctggcagcccttgatcttggtcatatccgcaaactcagagccattgtcaaacgtgattgatttaaaccaggcaggatgtctgtcaatctccttttgaagcagcctttggcatgtgcttgcccgatagtcaggaatcttgataactacttcaaagcgtgtggttctttcagtcaaagtcattaaagcaggctgattcttgcgtctgacgcctttaaccagatctccttcccagtgcagcggagcttttctgtcttcaacctccttaggacgctgttcaatggaattgccaagatgcttcttgtgcaaagcgtgaccgccatggctgtgatgacgcttgttcctgcgtcttttgagcttcataggcagatcaatattgcttatgtccagcaagccctgatcaatatagcgatagacggttggtgtgctgggacaagggtagcctggcatagtcctttggaattcaccaacgaactcatcgatgctggtggcatcaaatttagctttaaagcgtctggagagcattctcaaaaagacagcataatgcttcaatggattgcgctgatagcagtttttgcgacgcttctcataataaatctgtgcagtatcagcgtaatagtgctcatacaataaatagctgctgtctctttgcaggacgcttccgcgtttgatttcgcgactgattgtcgacttatggcagccaacttcttgagcgataacagtacgggaagttatgccggaatccagcattgcttgaatttgtccacgttgtacgctggttaattgatgatagtgcttagaaatgctagaatttgaattggtcatgaagatcttcctttcttgatttttcgtcacttcaagtttaggtcttcatggcctttttgtttaacacttagtgttgcacttcaattttaaatccgggaacaattataattattttcgaagcattttatttcttattttctaatacctaagcctctagagaaaaaaagtcctattaaatcttggtacccaaaccttgatttaataggattttgtttatgcctcaagattgctcttaggcatttgtttcttctcatttaattttcttaacttagcggcttttttcttagtcaaccgagggaacttcaatttaaactggctgccctgaccctcaacagattcaacactaattgttccgttataactagcaactaatttttgtgcaatcgatagacctaaaccattgccacctttttcacgggttctagccttatccacacgatagaagcgattgaagattttcttttgatcttcttcagaaatcccctcaccaaagtcttgcacaataatattaacattcttcttagttacaccagctgaaacattaatctgcttgcgatcagtcgaatatttaatcccattatcgatcaaaattactagcaactgttccaaatgaccgtgatacatttgaatctctgtatcatcaggtaaatcatcctcatccagctgaatcttgaagtcaggatgaaccattgccatatcagcgaccactctgcggatgatttcattaacatcacttacttcatacggatattgaacatcgatttgctcggctcgagttaaatcaagcatttcctgaattaaatgtttcatccgatcagcttcttgcaacgaagccttaattgattcatccaaaatctgcggatcatccttgccccatctttcaagcaggttcaaatgcccttcaattactgccactggtgtccttaattcatgtgagacatcaccaacaaattgcttttgttgctcaatgtaaccttgcatccggtctagcatttgattaatcgaagtagctaattcttctaactcatcatctcgatgtagttccttaattctagcctcactattaggatcagcattaacttccttagccaccttagacatcgtcttaattggccgaactacattaacaaccaaaatataagaaattgcaatgaagataattattgcaatcagtgaaataattaccatccaatgaagcaaattactcatcaagctattgtaataagtcatactattagaaaccactacatagccagttaatttgccatttacctcagaatagattttctggtaggttaaaagcattttgcctttttttcggtttactacttcttcaagttggttgccggcaaattcttttagcttaggtgcagaattaccattagtaaaaacaatttcatcatgtttgttgtaaactgctacattaatatctggattcgaaatcgatgaaatcaggctatcactaaatgctttattctctgtatcttttttgctaatagcaggaccgcccctcaaaatacgcctggtagacggtgacagagcaggaattacatttgagatctctagctcatcttgaatagaacttaatgtccggtccatcgtggtaactacattattagatgtctcttgttgctgttccatcgattgatgactaacaatttgataggcaacaactgaaaatatgacaaaagagaccgtaatcgttaatgcaacgatactaacccatcgcacaattagggatgagtgcttggcctctttttcctcgtctttattcttgatcatcatcttcatctcttaccatataaccggtaccacgaaccgtcttaatgtaagatggttgacctggagcgtcaatcttattacgtaaataacgtacataaacttcaactacgttagtttcgatattagattctggaccccagatcttgtttaataattgatcacgactaactacgttgttcttattttcaatcaaggtcattaataagttgtattcgcgtttagttaaatcgattgccttgccatcaccacggtgcacaattcggttagcagtttcaattgtcaaatctttaaattttacaatcttttgcttagcaacagtaacctttgatgcgtccttttcgattttaacgcgacgtaacactgcgcgaagacgagctaaaagttcttcaattgcaaaaggcttaacaatataatcgtcagcgccatgatccaaaccagaaacacggtcgatcactgaatcacgtgcagtcatcatgataattggcgtagtcttaacttgacgaacacgacgtgcaatttccaacccatttaaatcaggtaacatcaagtcaagcaagatagcatcaaagtcttgactcaatgcatcttctaatcccttacgaccattattctcaacaacagtctcgtaattttcatgttgcaattcaagctcgacaaagcgagataagttcttttcatcttcaataattagaatttttgccatgttaattcatttcctcgtagatcaatttggttttctaatactaataaattaattaaaaaatgcttttataattaaaggatactttaaaagtgcttctaacacaagattaaaaaacaatcaaagtaaaaattttctttgattgtccaccatatttttcaattacatttattacttatttttattgtccttatcattatcttgcccatcaagcaagaccttcaatttagcaaaagctgggttaacttggttcttcttgccttcttcaaaagaggtttcagaaacaacttcccaaccttgaccctctgggaaaatattcttttctttttcttcaggagtcaaaatagtagttggaatatggagtaaaatattatcttctaccgctgtttgcaagtcaatttggtcattctcaacttgtacaatagtatcgttttcttccaattcttccttggttggcttacgatcaaggtagttttcagtaaaagtaaaatcttcatgatagtttaccggcttaaggcttctgcttgatggcacaaccagatcagcggccacatgaaaactgccagtcacaaatggttcttgatagaacaagtcaccgctcacttttacatttttcgcatcaattagtagatctttactacgcttaaaaaattctggacgcatttccaaatcacgttcaatgtgagttaatggttccttggaattttgaatcctagaaaaactaagttctaacatttttacacctcgattggccgtcgaccaaagttttgatcaacgcccattatttgttcaaataaacggtctaccctaacttgtaaagctaaagagccgttcttagcacttcttttatcaactttagagacgatttctgtctgaaattccttgcgctgttgctttaaatatttgcgacctaccttactaaagcctaagagcatcaaagactcatgattaaagctagccaatatatcatcctgagtgacattaagcaaagtatataagctcaaacggcgcaaacgggaataagtataacgcttggacttgatatgccgcaaaaattctgtaaaatcgcgggctaaatgaatctcttgtttcatcttatattcaagcccttcgctcatttgataaatatgacgcaattcttcaactgaagatgattcaatttgatacttcaaaaatggatatagcaaattccaattaggataaattttctgctcagctaacaccattgcttctgctttaggcatccaatactttaaattttttgtatcttcaccatgcaataataaatttcgaatcgcactagcactttggacaactttttctctttgtaaaaggtcatcatgtcctgctccaattcggttgaccggatgcagatttaatggtgaacctaaattatgattagctactgaatacgctaaccccaaaatagcatttggctgattaacttcatagcctacttcatgcgctaccatttggttgtattgtgttgaataagtttggctataatctctaaaatccatgtgattctggggaatttccgcaattcttttacccaaataagcaaaattcaggttagcatcttctacaccaaagactaaatcagttacgcctaatttagcaagttgttcaatgtttccgagagcaaaaagatcagctggttctactgccgttgaaaatggtgtttcaaataccaaatcggcaccagattgcaaagccaccttagcccgctcccacttgctcataatcgccatctcaccacgttgcacgtagttaccagacatgagcaccacaattggatcattaccagcaaccaagcgtgcttgatttagcaagaactcatgtccactatggaaaggattaaattccgcaataatcccaacaacactcattgcttaatcttccttcaattcaacttgcttaccgttagcccatagcttttccaagttataaaattcacgtgcttccttagtaaagacgttgactacaacatcacctaaatcgagcaaaagccagttagaatctctggtaccttcaatacggtagtcagtgtagttgttttcgtgagccgcatcaacaattgagttaacgatcgcatgtaattgacgattagagcctgcactggtaataacatagtaatcagctaaaatactgattccacgcatatcgtaagcttcagtatcttcaccatgacggtcactaattgcttgggtagtaaaatctaaaatttcttgactagtcaatatttttctcctttttattacttaattccccatacattgtatgcttctaaagtacgaggatatactttatttttattttcaattaaaaactctaaggtgtgctgcaattcatagcctaccccttcatcaagactagcataagcaactttgcgcgcttcttcaactcctggaaaatctcgtccgggttcaataaaatcagctacaaagataattttatctaatgtagtcatcttagtatcaccagtcgtatgacgacgtacggcagttaaaatctcaggatccctaatttttaaatcacgttcaataaagaaaatccccacaatgccatgccagatggcccgattccaattaagcaaatctggatcaaaatcctgttccttaattaccttacgatactcttctaccggtacctgcttggcataatcatgaacaaagccagctaaggctgctttttcttcatcatatccatttaacttagccaacttacgtgcagtttcactaacacgaacacaatgttcaaaacgttttttcttcatgtttgccttttctttagcaacaatttgttcactagagaatggtgaataagtatttttaaaaattagtttcgtcaaggtaaagccccttttcttcaatatattctctgacggcttctggtaccaagtaacgaattgaagtgccagttgcgacactgcgacgaatagcagtcgaacttaggcgaatatctggtgcgtcaacccaaatcatgggatattgcggatcttgtggataacctggacgacgaattccgaccaatgttactagtttagccagggtcggagcttccttccaagtatggaaactgttaacctgatcactgcccataatcaaataatagtcattctgaggtgctttttccttgagataacgcatagtatccacagtataagaaacgccgcctcggaacaattccaatagttttaccctaaagttaggattatcgcgcgtagctaaatcaagcatcgttgcccgatctttagcagaagtcagcggagcatttttatgcggtggaatattatccggaataaaccagacctcatccagcttcaacttagtcattgcttgctctgccgctaccaagtgcgcaatatgcaccggattaaaggtaccacccataatcccaatctgacgacctttaccttgttcttgttccaattctgcttcaactttagcagttggcattttttcaatacattttggattaaccatatgcaaacctctaaatcaatgcacgacgaatacctaaaccaatcccatctggtgtgtaagtcttaacaacgcatcccttgggtacagtcacaaaaccaattccaccaaataaaaggtcactcttatattccgttctaaattcttgaccctttagtggtgccatttcatcatctgcagctggtggggataacaattcacctttatgctttttataaaagtcatccgcattagctgtcttagtacggtgaatatacattccacgagcaacgtaaacagtaaagctagtcgattcgcccttgagataatcaatccgtcccaaaccagctaagaataaagtattaccaggcaataattggtaagtagctggctttaaaggcttcttaggtgagaccagctccaaatccttagcatttaagtgcgtagccaattgattctcggtcatgatcccgggcgtatcaatcaaaaagtgaccattttctagaggaatttcaattttgtctaaagtagttccaggaaagcgtgaagcggtgatcaggtcttgaatatcacccatcatgtcaataatggcattgattaaagttgacttaccaacattagttgtccctacaaaatagacatctttgtcttgcgattgcttattaatataagcgatcaaatcttccaagttcaacttctttttagctgaaaccaagaagatttccttaggataaagccccattcggttagcttcttgtctcatccaatccttaatcttactttgcttagagtttttaggaaatagatcaaatttattaccaactaaaataaaatcattatttccaacaaaacgcttcaatgatgatagcaaagaatttgaaaaatcaaataagtcaactacattaacaattaaagctttcttttgtcctaaagagttaagcaaagctaaaaaatcatcgttgttcaaatcaactggcatgatttcgttataatggcgcaatctgaagcaacgttgacaataaacatccgcattttcttcttgctttgccttatctagtgcactttttggcagataacctgctttttcaggatcatcggattgcagcttggcaccgcagccgatacaaataatatcctcatccatttgatagctccttcttaaatgttactcgatgtgataaacccaggaagaaaaagataattttttcaaagaaacgattgattctcgtattccacttatcagtttcaactaatggcttaactagaacagtcttcacgccggccaaattccctgcttgcatgtcagtgattagttggtcgccaaccatcataacctgatctttttgcaaatgcattgcttcgcgcttcttggtgatcgcaaatggcaatggcttacgtgacttagcgacaaattcgatatggtaaggatcaagtaccttgcccactctttgagcattattgttagaaatgaccacgagagtgattcccgccttggctaacttttgattaaaattatccatttctttggcagtttcaaatttattccaggcgagcaatgtattatctaggtctgaaaaaaccgccttaatgtccatttcattcaacttctgggggtccagattgtaaatcgtatcaattgtatattttggtctaaaaagcatatcaacactgctatataaaacatagaaatatgtagaagaatgtatatttttttacatatcagaaagaaatatagtccttcctttcttcgctttatttactgctgtcatcattagtattccaatattccaatctaggagtaatcgcattgactaactcttgcagcttaagggcttagccagccccgttttcattattttgctaaagctaaaagatttaacactgcattatcatcacgatcattagtataaccgcattcataacaaatatactcattgtgcttagtgtgatgtttttggttgccttgcaaagtgattttttcatcaccttttttaacataaccacaattagcacatctttgggttgatggatatgttttatcagccaagattaattctttgccataccactcacatttataagtcaatatctgtctaaacttactgaataatgatctctgcatgccttttgaagcgacgtgcgtcatcatcatttgtttaacggctaggtcttcaatcactatttgatcataattattaaccaattttgtagtgaatttttgcaaaagatcgttttgaatgttggctactttacgataatcacgttgcagtttggttctcacttgcacgtaattattgctttggccagctaacttgccattagcccgtcttttcttagccagcattctctgataatgcttaatgcgcttgtatagtttttgcaatcttgatggcaaaacattgattttgcccccagtgtagttgaaatgtcccacattaacatcaacagctgtctttctacctgttctaggctttaccaaagtttcttcttcataagaaagagcggcataataatgtcctctttctctaaagacactagcaactttaatttgcttcatttttaaagcttcatatgttggaatatcgaaccaggttttaatgcctctgggcttgtctaagcgtagcttaccattaaccactttagcccggtcagtcttaaagccttgtcgcggggccttctttgatttgaaatgtggtttcccccaatcaggctgtgccttatcaaagaaattcttccaagcattagccaaatctttgactgctaattgcaagcatctagcagacagagcaaactgccagtctgccttattatcgactagctcatcacgtattctgcgctcatttggactgggattattatccttatctaaggttcgtgcttcatacatgtcttgccaagtggctaaagcttgattccagcaatatctgcgataatcacaaagcttatccagctcttgttgcatggtcttgttaggttttaattcgactacttgagccttgatcatttgtttcacctccaatacaaacataaatttagcaaagagtgaaataaatacaagcgaacaaaatattaaatttttagtttttgacctgcttctatgttttatatttctgaacagatctttgtatcttgtctatcttttaactgttaatttcctccattttttatcaccttatatcatatcaaaaatgggtttgctttagaaatttttgtttttttctgatgaaaaagtgttacaatactaaacaatttaagcaaaatcatcaatcaacagaaaggatcaccatgagaaaattcatcgatttacaccttcacctcgacggttctgtcccagttgctactgttaagaagttaatgcaggaacatcacatgccacagttaactgatcaaaaattgcggcaagaattgtcagttgataattcttgcgctagcttggaacaatttttggaaaagtttgacttacctaaccagttaatgaagacaaagcatgatctggagatgattgtgtttgatcttctttgcgaattaaaacaacaaggtctagtctacgccgagatccgctttgcaccgcaattacatactaaaaatggtttaacgcaaagacaagtaatcgctgcagcagtcagcggtattacgaagttttatcaaaaacaaaaagcagacaaagatcagcctgaattacacgctggtttaattctctgtttgatgcgcttcgcccacaatgaaaaagaaaacatggaaacggttgagctagcgaaagaatttttaggtcatggcgttgttggccttgacctagctggtgcggaaggcccgatccctcacattaactaccagcattttttcaatcgtgcccaagaattacaccttccttataccatccatgctggtgaggctgcgggacctgattcaatccgtcaagcattaaaaattggcgcgaaacggatcggccatggcattcgctgcactgaagatccagcacttacccaatatctgattgatcaccaaatcatattggaatgttgcgccacttcaaatatgaacaccaaagcttttgatcagattgattcttacccaataaaaaaattattgcacatgggaatgaaagtcacgctaaattctgatgatatgatcgtttccaataccaatttaccgcatgaataccaactgcttgaagaaaagaccgccttgactcctgaagaagaaaccactctttatctcaacgcggttgacgcggcctttactacgccagatgaaaaaattagattacgagcattaattcaaaaatagataaaaaaataagctaggaaaatttccctagcttatttcttttgttattagttcaaagctttcttagcagtttctgctaattgtgcaaaagtctttgagtcgttgtaagcaatatcagctaacatcttacggttcatgtcaacaccagccaacttcaagccgtgcattaacttagaatatgagatgtcgttttgtcttgcagctgcgttaatacgagcaatccataactttctgaattcactcttacgtcttctacggtcgcggaatgcgtacttgtatgaaacgaataattgagtgcttgcagccttaaattgcatgtgctttgcgccacggtaacccttggcaagcttcatgatcttcttacgacgttgacgtgttactgttccacctttaactcttggcatttaaaattcctcctactatagtctgtcttaattaagaacaagtattagtgcatttgagcaaccatttgcttgatacgcttcatatcactctttgaaaccatagcagcttttctcaagtgacgacgttgcttctttgtcttaccgtggaaacggtgaccagtaaatgcgtggtgacgctttaaaccaccatttgcagttctcttaaaacgcttagcagaagcgcggtgtgttttcatctttggcatatttctatttcctccaattaactactttttctttttgtccttatcactcttaggtgcaagcatcaagaacattgaacgaccttccatcttaggcttactaattacattagcaatgtctgaggttacttcggccattttttcaagtacttgttgacctaattccttgtgagtgatggcacgacctctaaaacgaattgagacgcgaaccttagctccttctttagaaatgaacttacgaacgtgcttaagtttagtttcgaagtcgttaccttcaatagttggactcaaacgaatttctttgacactgactgtcttggaattcttacgggcttccttaagcttcttttgttgttcaaagcggtacttcccgtaatccatgatacgtgctacaggtggcttagcatttggagaaatcagagctaagtcaagacctgcatcgcttgcacgacgtaaggcatcacttttactcatcacaccaacttgctgaccatcttcatcaattaaacgaacttcgcgagcgcgaattctgtcgtttaagattaaacttcttggtataactgttcacctccgtgttaatttgaggacaagaaaaaggcgggttataagaatcatacccgcctttaatcaacagaaattatcaatcagcctagaggtttacttaacttaggcgagaagcgggtgcttcttcttgttctcaactagtagtagtatactcgcttaaccattatccgtcaattaattgttgacaattaattgacttttttatcttgtttttgataaagcttctacaaaccatttagaaaaaatttctggatctacagacactgctatttcagcattatttggaagatctagcttatttttaaaatccatcaatgaagcaccatatgtataaccggtttgaacatcaatttctacatgtgtatttttaaatttaaacatttgcggatttaaaagtacgcctgctgcaagtgcatcataaattttaaggccagtttgaaaactgccacctcgaaatttcttaaataagtcgtaaaacatatcaccagcttttcctaactgtcgtatttgattacttacttcaggcataattttagcttgtgcacctaattctaaaggcgctactctaatttttaatccactttcaaaaatgatttttgcagcttcaggatcagatgcaatattgaattcagaatagataccataattacctctacccattgctccgcccataataattagttccttaatattttttatatcatctgggtataaacgaacatatagagcgtaatcagtaagtggtgcaattccaataagagttactttttcagaagaagctgcaactattttatgtatggcaaccggtgatatgccatgatccaccaattcaaaactaggatttggaaaatcatatccgtccattcctgatttaccatgtatttctttagctcgaatagattgtttgactaatgaacgctctaccccttttactacaggaatacttttaccgaaaaatttctccaatttcaatatatttattaaagcttgttgcgcattaacattgccattagttgcaataatacttttaacttcaattgcaggcgaaaaaagacatattgctaatgcaactgcgtcatctattcctggatctgtactaataataactggctttttcattaagaactccacttcctttttggtaatgttcgtattttcaagaagataaatttataaataaatctatttatattcataaataatacaatacgcatacaattaacacaaatgttattattttaattcatattttgtattgacttatttttacatttaaattattctaagacaagataaggaggaatacgaacaatatgaaaataaaatccagtttttggctgctatttccggcatttattagtgtcttgatttttgcattctttccattaattcagattgctataccaacatttcaagattctaaaggatttttgcacctatacactgaatttctaaaaaacacgtacaatcttcatgtaattggtagaacatttaaaattgctttactcactatgatcattgttttaattcttggaattccaatttcactttggattgctcgtcaaaagagcaaagtaagatcaattttaacaattatcattctttttccaatgttaacgaatgcagttgtcagaaactttgcatggatcattattttaggtcgtaacggtattctaaataaatttctgatgtctattcatttaattaattctccattaaacattctttatactgatacggcaattatcatcggttcagcttatttatttctcccgattatgattatttcattagttggtagtatttctgagctaaacattgaagcagaagaagctgctgctgtattaggcgccaatccatgggttaatttgataaaaattgtaataccacaattagtctcagggattttaacaggatgcattttggtctttgcaggtgcgatgacagcatatactaccccacaaattttgggaggtaataaaaatttagtaatgtctaccttgatttaccaacaagccatgacattaggtaactggaaaaatgcaagtgttattgcaatagttctgattattatctctgctttatcaatgatattaatgagaaaagcaagtcgcgctttggatagagactgtaaaatagtttgtgtaaggatgaatgattccttaaatttatttctttaaacattagaaaaaggagttcctttctcgtatgattggtttgaacaaaaaaacacatacagaaagaagaactccttcatgaatgattttaccaaagattttgctcaagctctattcaatccagacaaaataaatgatttattgcgcaaagagctacaacaggctgttaataacttgttagaagctgaattgaccgcctttctgggctatgatccctatgccagaaatggctggaatactggcaactctagaaatggtgcttatttccgcaaagttgatacgcaatttggcccaattgaagtgcaagtgcctcgggatcgcaacggtcaatttcatcagcacacgctgcctgactacaagcagcactcggatatcttggaaagcatgattatcaagctttactccaagggcgtgaccaccagggaaatagccgatctaattgaaaagatgtatggcagccattacagtccagctcaggtatcaaatatttccaagcagatgattccaaaggttgaggcttaccacaaacgcaagctaagcgacaagtttttctgcgtctatttggatgcgacataccttcctttgcgccgagaaacatttgagcgtgaagcagtctatattgccattggcatcaagcctaatgggcacaaggaggtcattgactactgcattgcacctagcgagaacattgaagtctggacagatatgcttcaaaacatgaaatcccgaggcttaaagcaagttgagctttttctttctgatggtgttgttggcatgaaaacagccttggccaggacttatcctaaagctcattttcaacgctgtttggttcatgtcatgcgcaatatctgcgctaaagtacgcgtcgacgatcgtgaaaagatcatgaacgaattcaaacaggtgcatcaacagacaaacaaagaagaagccacagctgtcctgcatgacttctataccaaatggggcaaggtttacagccatgttatcagaagcttgaaagacatagaaccagatctgctggtcttttataactatcccaagcagatcagagcttcaatttattcgactaacatgattgaatcatttaacaatgtgatcaagcgcaaagctaagcctaaggcatagtttccaactgaacagtcgcttgatgcttttattggcattcaggcaatgagctacaatgaccgttatttcaatcgaattcataaaggctttggtcaggttcaggacaccttagaatcctactttgattaaataaataattaaaaaatcaatttacgagaaagatctatttacacaaaagatttgacagtttctttggataggagacctaatattaatgcttaatcgtaaaaataaaactttagcaattatttctattattatcctgatattattgatgtttcctctacttttagtaattattacttcatttaataatcaggattcaatttctctaccaattaaaggttttactttatcctggtatgccaatatttttcagcaaccagattttatcagtggatttgaatcaagtttgttcgttgccattattgctagtctttcggcattaataattggtatccctgcagtttatgctttaacaagattcaacatcgttcataagtcttggtttcactctttcttcttaagccctactctaattccagaaattgtaattggctttgccttatatcaagctgctgtcgttactcttagactacctgttatgcctagtctaattattggtcactttttattatgcctaccttatgtaataagactagttacagcaagtatgttactaatggataaaaatattgaagaagcagcttgggtttgtggatgttcacctcagaaaggattcttcttaatcgttttacctaacattaaagcaagtattgtagcagcctttatgatgtgttttattaattcatttaataatattccaatttcattgttcatgaatggaccatcaattacaatgctgccaccagcaattttgaactatttacaaaacaactatgatccaactgtttctgctatttctgtagttctaatgatttttacagcattaattatgcttttaactgaaaaactagttggtctaaataaacttactgataggaacaattaaattggcaattttagaagtaaaagatttagcaaaatcatataacggtaaaaccaaagtattaaaagatatttcgttttccgtaaaaaacggtgatttagtatctattctaggaccctcaggttgcggtaaaacaaccactttaagaatcatagcaggtttaattccagcaacagacggacaagttttagttgatggtgaagatgttggaaaagtaccagtttacaaaagaaactttggaatggttttccaaagttacgctttattcccacatatgaccgtctttaataatgtagctttcggattaaaaatgaaaaagatgtctaaaagtgacattcaaaaaagagtcgatcaaattttaaaaataaccggcttgtctaaattagcttctcgctatcctaaagaattatctggtggtcaacaacaaagagtttctttagcacgtgcattggtagtcaatccacaattattactaatggatgaacccttgagtaatttagacgcaaaattaagaattaaaatgcgtagcgaaattagagaattgcagcaaaagctaaaaatgacagttctttttgttactcatgatcaaagagaatgcttcgctatttccgataaagtattaatcatgaaagatggcaaaattgatcaatatgatactcctgaaaacatctttcaccaccctagttcagaatatgttgctagattcatcggttatgataatttcatcaatgttgatgaaattattaatgatcgccaaattaaaagtaaagatcttgttttcttaactgatgaaaataatattcaagctaaggtattaactattagacccgaaaatattttgattaattcagaagaaaatccgtctaataatttgattgatggaacaatcactagtcttgagtatttaggtcagagctttaaatataaggtaagtactagtctcggagacttcactgttgaagagtctaggaaatcgatgcgtagctcaggagataaagttcagctttatttgccctccaagcatcttcatccgttgtctagataaccaattgtaaagaaaggaataaaaatgaattttaaaaaagttggtttattagctgcaagttttttattagttggttcagttgcatttggtacaactgcatgttcatcacaatcatcttctaacggaggaaatttaactgtttcaacctttggtttatctaccaaacaaatgcggaacgatgttttaaatccttttgctaaacaatcatcagttaaagtaaaaactcaatttggtgatagtgcaacaagacttactcaaattgaacataaccctaatacaggtgttgatgtaattgaacttgctcaaaacaatgctgttactggcgataaaaagaagttatttaagaagttagacttctctaagatttccaatttcaaatatttatcaaaatcagaacaaaaactagctaaagaaactaatacagttccttataccgtaaacagtttgggtattatctataatccaaagaaagttaatattaattcttggaaggacttatggtcatctaaacttaaaaataagattgctgtacctgatatgacaactacttttggccccgcaatgttatatattgctggtgactatgctggtactagtgtaactaaagacaacggaaatgcagcatttaaggcaatgaaagaattaaaacctaatgttgtcaaaacttacacccaaagttcagatttaagtaacatgtttaaatctggtgaaattgaagctgctgtagttggtgattatgctgttggtatgcttcaagcaactaatccaaacttaaaatacatcgttcctaagtctggtacatatgctaactacgataatgtctctattttaaagaatagtaaaaattcagcagctgcatacaaatacatcaactttagattaagcgaaaaaattcaaaagaaagtagcaggtcttaaatctttgaacaacgctcctgtaaacactcaagttaaattaacacctgcagaagcagcaaacaaaacttatggctcagttgctaaaagagcaaaaactattaatttcttctttgtaaattcacatatgtctaactggatttcaagatggaataagattatgaataaataattgatgtttattccctataaggagctgaattgtagattcagctccttatcttttatggaggattttaaatgactgaggtagacttaattatcaaaaatgctcatgtttttaatgtatatttacgaaaatttcaagatgttcaagtaagtattaaaaatggcaaattctattggattaataaagaattacctaatttaaaagcaaaaaaagtcatcgatctacaaggtaaatatttaatccctggttttgtagatgcccatatgcatattgatagctcaatgactacacctaaaataatgggtgaaacaattctaaaatatggcacgactactattattgctgatgatcatgaggttactaatgtcgccggtattaatggattaaaagatttcattaatgaagattcgccaattgatattttcttcggcatcccttcttctgttccttcaaccaatcctcaaatggaaacaactggcggtaaaattggtgtgcctgaagtaaaagaattacttaaagatccacgctttatttgcttaggtgaagtcatgaactttaaagatatgacttctgacaaggacactctaattaaggacataattaatacttgtcataaaactaaacctactatgccaattgaaggccatacccctgcttatcatggtgaagatttagctaaaattttatatgccggtgttactactgatcatactcaacaaactagagatttagtcaatgaaaagataagaaacgggatgtttgttgaagttcaattaaaatccatgcatccagatgtcatcaatactattattgataataaatattttgaacatgtagccttagttactgatgattcaatgcctgatactttgttaaaaggtcacttaaatttattagttaaaaaagcaatcaatatggggatgaagccagaagacgccatttatatttctacctatattcctgcaagacatatgggattatgggatcgtggtgcaattgcaccaggaagagttgctgatttctccattctggataatttagaagaactctcaatagctgatgtctataaaaatggaatatccgcaaaagagactatcaaaaatacttctcaagatgatttttcacctaatagtctaactactagtgtgaaagctcctaaattaactaaacaagacctattacttaaaacaaatcttgttgataatggctcagttacagcaaatgtcattcaaataaatcctgtcggtacttttacaaatcatattcaaaaaaggctagctgtacataatcatatcgttgattggcaaagtgcaaatttagctttaattattgtccaagaaagatatggtttaaatgatggtaaatttagcttaggcctagttgatcgtggcattattggtgatggtgctgtaggggcaacctgggctcacgatcaccataatttgatggtaatgggaacaaatatagatggcatgattgacattcaacatcaattaattaatcagcaaggtggttatatagtcgccagaggtgaaaagattgcagccaatgctcctcttccaattggtggagttgtaagcaatcaaccaatgaagattttaggagaacaaattggtaatatacgtaaaaatctcgtagaattgggctataaaaatacaaacgaaattatgtctttctctactttgtctttacttgtttctcctagtctaaaaatctctgataaaggtctttttgaagttaaatcacaaaagaaagtgcctttatttgaaaaataattttcttatgaattaacatattttctatttcgccgattgtaaaatcaaattgaacactttagaaaaataaaaagtccatttggacctgtttgataaaatgtaattaccacaaaacattcagaaacgaggtcacaaatggactctttacattctatcatgcctaagcacgaaaagggaaagtatttatcactagaagagcgagttattatttaaactcgtatcaaggatggcttctctcttagagctattgcccgtgaaattggctgttctccttctacgatcagttatgaagttaagcgtggcacagttttgctttataatggcaagcaaaagcgatataaagcaaaacatggtaatgaagtttaccacttggatcgtcaccgctgcggtcgcaagtcagatttcttaaagaagaatgactttattaagtatgtcattaagcacttctttgaaaataattggtcgcttgatgtatgcgccaatcgctgtctggctataggaaaatttagcagcgaataaacagtctgtactagaacgttgtataactatgtagaccaaggcttgttggctatcagaaactctgatttacccgaaaaattaaagcgtaacattaaaattcatcgtgtccgtaaaaacaaaaagaaactaggtcgaagcattgaagagcgccctaaagtgatttaagaccgaaaagagtttggccactgggaatgtgacctagtcttaggacataagactagagacgatcaagtgctgctaactttgtctgaacgaatgagtcgagagttcttgatcatacgtattccggataaaacggctaacagtgtaatgtcagcttttcaatccttgcacagtcaatatagaaacactggaatgaaatttttaaaacgattacaactgacaatggctcagagtttgcggatctatccaacttagagaaagtatctaacactttagtctattacgctcatccgtatacttcttgtgataaaggcactgttgaaagacacaatggccttattcgcagattcattcctaaaggtgactacatcaataactattctcttcaagaaatcattgatattgaaacctggtgtaattcattgccaagaaaactattggcatatcacacaccagatgaaatctttgaaagagaattagacaaaatctatcaagcagcttaagtgttcaatttattattgcaatttacgctaatttcttatccttgtaagcgtagctgataaagtagttgccagcaccgccgccgacacgcaaagcattaactttcttacccttaacggtcttcttcataggagcatagtagtagccgtcgccgctaccagcaagccagccgtttgcgttgaaatccgtaataccgtggaatttaaaggtataagcttcaaattgtgagctagaaactttgtcagctaatttgtagttagccttttcatcggcagcagttaactttttatcccacttatctgcttctttaccctttaataccttataaaccttgaggccgttaatagtatgtgcagtaattttagttctaataactttaccagcttctttgtgttaccaaacaccacgcgtattcttaggtgtggtgaaaagtttggtagcaccctaactagcagcatttgctgtgtttgcatgaacgctagccaaacctaaaacaactaaaaaagcggcaataaatgataaaacttttttcttcattttttatatctccctttcaaatttatacgtcaattatgccacggaaaattctaatgggagctaaaaatagagcaatttttgccctatttttaaacatgaagatcgttattatttacccaagctgcagacacaaactttacagcgttcctaccacagaacaatgcataagtagaagttattccttgaaatttttgtgggcaagaatcacttttcagggatgaatgaatttattagcaactaaaatcaataaaaagataaagtcccatttttctttacatatttatcagctaaattaaatactagcaatccaataatcaaccataatacggtattaaagatagattcgcttaaataaaacgctaaattgtatggtcgattgttaactgctaatctcatccaactaaccattggacaaattggcaataaacaagataagcattttgtaagattggagtagttttcaaaattaactagtagtatacctaagtaaatatattgaaaaatcactaaggtactgccaattcttttaaaacgtaaaactaagctaacaattaaatagcctaatcccactgtagttagtaaagctaatataaatggaacaatcattattactggaaaactaatccagtgatcagaaattgccattactgctatcagaattaaaattgcttggacgaatgccacaacaatatttgcaatacttttatttaaaaataatcttctagaagaaattggcataagatattgttgttctaaaataccacttttggcattattcatcactgttgatcccatttgggtaagtgtcaatgtttttgcggtagcctttaaaccattagtctaaccttaatttcttaaatatttatatgacttaaatttctgcttagcttgcttaaataactattgccagctacctgtgcggttaatgcgccatgctggatgcctaaatgaacttcatgacgcttctttaagctgtcacgggccgctgcttttaattcctgttcagtcaatacagttatttctgaatcttcaaactcgctgctaagccaaaattccagctctcgattcttgatgcagcttaagatcctaagcatgccttctgctccagattttgaccatttcttgccttgccccttaacacggtaggtatacttgcggtggttgctctcgcagcagccaatggctttagtcacagtcagttttcatttcttaaacggcttaatatcgtcccaatgacgatcaatataattccttaggcgccccagataatcatgattgagctcggtattcaattcatcaattagtcggctttctgcagtggttaggatagttttaactttgtcatagctgtatttgtattccaaagcagaaatcagcttgccttgcaggtcaggcgcaaaatatagcctttctttgattttcttatttaggtgaaagacatccaagaaatgctcatgacgcttgcatagccctacaatgtcatcgaagtctgttttggcatatccagcaccgccatcggcgttgctaagaattacagtatcagaaagatcataagtattggccaggtactccttggcttcgttcagcgcatcaagtcggcttaaagaaacaaattccttggcattgattcgctttctgcgtttcttgcttatattgacaatgccttcacagacctgatagcgatgaaattccaaccggcttttagtgcctttgatcaccacgccatcgccttcaagatacaaaactgggacctttttcttagtgcctgcggcatcatatcttgaatctgcttcttggcccgctttaatatttttcccggccatttttaccaaattgcccacctgcatatggctaatattaaagccagacaggcaattgactgctagagcagtattgcgataagtggcaacgctgcttacttctaagatgtttttgactgctaaaatactgtagcgcttgtatttgtcaaagcccattaattcatccaagggataccttgcttgtttgcctgggcagacatatcttcttctgacatacctaacttcgccaaaagccatattgattgagcgctcattcttcttatcaatctgatagccctgtgctttaaccttggtaatcatttcatcatcaactttagctaaagccaaggccatgatttccttaatcaggtttaagaagaaacagattatttttctttcacgcttaatataattatcttcagactttataatatttgcgatttcagttacaattgaattcataaaagaccagcttctaatgtgttttttgttcttaacatcagactactggtctttttgtttgagctcaagtccaaattcaaaggacttgggcttttttaattatttattcaacttaccgtaaaaaattatacacttagcccatttggctaatagtgttttcaattaaactccacaaaacatagccaactactagggcattcaatgattttcctaaaacgccacctcctacaaggctaccgccccaaaaaatagccataaacattaaaattaataagaaaaattctgaaatataattgaagaggtatctcttatataaatagaattgacgccaaaattcagctttaaaacttatcatttttccttctccgtgtagtacttaaaaatttcatctaatcctctagtcacagtttgtatactacttattggtaattcactcaataatttaagtacttgtgaaagagatgcttgcggtttaacacccaaacgataaactccgtcagtcttctttgtaagttcacagcttgcaagtatatcctctttttctgaggcggtaagttcttgggtgaaatgcacttcaaaaatttcttgtttattcagcttcttcaaactatcttttatactattagaaaagacaagtttaccatgattgattaataaaattttattagctatctcttgagcaaattccatttgatgtgtagtaactagaatccctactccattggcggataacatattcagactcttaatcattatttgagtagcattaagatccaaacctaaagttggctcatctaaaattaaaagctttggttcggcaatcatagcacagcaaattcccacaacttgctgcatacctctactcaatctggtaatagaggtgtatttcttatccaacagaccaaactgtttgaggaaagtttctcctcttttttctgcctctttcttgcttaaaccacgttggccaccccaataaacaaaattttccattggtgataaggcccaatacatatttctagatccttctaataaaacgccagtgtttttcaataaaaagagattgttgtgagttacatcttttccgtcgaatacaaccgttcctttatcaggactaactaaattaagaatcatttttaatgttgtagtttttcctgcaccattaggacctaagaaggcaacaatatcaccactatcaacattaaatgaaacatcagataccgcctttttatgtgctttttgatatgtttttgaaatattatttacagataataaagtcatgcaagggtacctctttcattttttaattatggtattctatttttcctttaactttgcatttattcgtctaacagtgttccataaatgtaaaaaatatccaccgtatgcaatagcgtacataataataaaatcaactgttactctaataaccatctttagtgaaatactaaaattatcaattaggaggtttaacaagaaccaggcaacaaaacagacgaagaaattaataaaaatttgttttttcaatgaccatttttcactattaaaaatccagctagctagataaaagaaaataccaatgagaaaagaaataatcgtccaaaaaagaaaggttttcaaatatatcttcgctgttgcaggattttgaccatttagtgaaaacaagaagtccatagccatccagatcgtaccgataccaataccaatcagtccactaatcagaccgttatataaaagatctttaatatttttcataatcctagcctctcttttaaatcctttattcttctacgagaaacttgtactcttagtccattctccaaaagcgcatcaatattgcctgtatttataatttctagatgatcaataaaatgataattaacaatagcacctctagaaatcattataaaatcgttaggtagaacactttgtacttgatacaatctgcccctataaacatatttttgattttgagtacaaatcattgttttttcattttctatttgaattgcatagatttgagaaaaattaatttcataggcatccccatctagatagcaccaaagaaaatcctgctccgaattcaactctttagtaatccgttcaaatctagcagtcattttctttaaccaaaattcagctttttcttctggtaaacttggatcgatattcaatttaactttcaattgcatccctccttgattgattattagtatacctgcttattttcgttaaattattaaattcaggtgaatggtctaaatttaacggtgagtggtatttttttgcatcaaaaaagctgctagaccacggtaaatctaacagctctatattttcggaatcaatcctaattattttgccttgtaagcagtttctttactggtggtaaatttgtgacccttagcaatataaacctttaaagtaggagtaaagtccaaaactgagtcattaaaagtgtattgttgcatgatgtcagcatcagctgaaacagtagttgatgtttctgccataccaacaacgggtgcggctgcgaacattgcagccacaaaaatagcagctaatttgaaacgtttcttcatatcatattccgccaaataaataataaaaatttaacgatttttttgaatatatagcaacttagaccaaattaaaataacggatttttattatagttcaataatttagatatcattgtcatatagaattagctacaaatcaatagataacaagcaaaaaataaaaaacgactcataactactagctaatttatagcagttatgaggtactttatcgtgcgtctcattttctgtttttaatttcataattatcaacactttttacttagtagcaatccaaccttcgttttctaacattgttttagcatcttcaattgctaatttgtgttctgcaaaatgtacgttgcttaattctactttgttatttaaaacatctaacatatatatcacctttcgattctaattctttattgcctctatccctctcggcatctttataataacactgtttattataaagcaaagtatctaatcgttgatataacagcatttgtgcattaatatacagatataatgagaccgtaaaatagtttgtgtaaggatgaatgattccttaaatttatttctttaaacattagaaaaaggagttcctttctcgtatgattggtttgaacaaaaaacacatacggaaagaagaactccttcatgaatgattttaccaaaaatatggcacaagctctattcaatcaagacaaaataaacgatttattgcgcaaagaactccagcaagcagttaatgacttattggaagctgaactgactgcgtttttaggctatgatccttatgccagagctggctggaatacaggcaattcacgcaatggtgcttatttccgtaaagttgatacgcaatttggcgagattgaaattcaggtgcctagggaccgcaacggcatgtttcatcagcacacgctgcctgactacaggcagcactccgatgtcttggaaagcatgattatcaagctatattccaaaggcgtaaccaccagagaaatagccgatttaattgaaaagatgtacggcagtcactacagcccagctcaggtatctaacatctccaagcagatgattccaaaagttgaagcctatcatcaacgcaagcttagcgataagttcttctgtatttatttggacgcaacttacattactttgcgtcgcataacctttgatcgtgaagcagtttatattgccattggcatcaagcctaatggccacaagtaagtcatcgattaaccgcattgctcccagcgaaaacgtcgagaattggacggaaatgcttcaagacatgaagtctcgcggtctagaacaggttgagctctttctttcagatggcgttgtgggcatgaagacggtactggaaaagacatatcccaaagctcattttcaacgctgtctggtacatgtcatgcgcaatatctgcgctaaagtacgcgtagatgatcgcgaaaatatcatgaatgaattcaagcaaatccatcaacagccaaataaagaagctgcgatcaaagtcttgcacgccttctatgacaagtggaacagagcgtacaaccatgtcatcagaaatctcaaagagattgaacctgatctgctggtcttttacagctatcctaagcagatcagggtttcaatttactccaccaatatgatcgaatcctttaacaacgttatcaagcgtaaagctaaacctaaagcagagttttcaaatgaacagtcgcttgatacttttattggcattcaagcaatgagctacaacgaacgctatttcaatcgaatccacaaaggctttggtcaggttcaggataccttagaattctactttgattaaataaaagattaaaaaatcaatctacgagaaaaatctatttacacaaaaaatttgacagtttcttctaatttttaatattttcttgaacaaattccactaaattaatatttggatatttatcttttatttgtcttactaaggcgttttttctcttcttagatagcggcttttttaactctatcaaagtaatttgcttatttttattatcactaactgcagtaacagaagatattgcagatgacagtttgcgaattttttgattacgtttttcttgttcttgttgacgtttttcatcagcttgttcttgttcatgctgacgctgattaataatattatttacttgtcgatctaattgattttctgcattgggattaacctgagctacttgtacaatattcagtgaatagcctttcaggtcatattttgttaagtttgctttagccgcttgaattttcttagcgttaattttatcgcctgaaactgtaagattaattatttttccttgcgtatcaacattttccttaattaaattaacattgcctaattcattaacaacaagattttgaacattttgatctactagagttttattcaccatctgattagctgacaagatactaggaataattaaaataattactactaaaattatcacaaactctttaaaggtcggcttgtgcaagaaaaacaacttagattgcttagtagaataacttaaccacttcataatttttacacccatgaatgcagtcaaaattatgaaaacacagttaatcaaaaataaatagcttgatcctaaaaaatatttaagattacctgccgcaattgaataccctatcgtacaagccggtggcattaaggctgttgcaatcgctacaccaggtacaatattatttgcttcttttttgcgagctccgattattccagcgacccctccaaaaaacgcaatcatcgcatcccagattgttggtgaagttcgtgcaataatctcttgactagcataagtcaaaggagaaaaatgaaaataaattgtagatgcagctaaactgataataatttctgctaataatgaaattgttcctttacgcagtaagtgaacatcatataaagcaagacctgtgccaattgctagtagtggtcccatcagaggagaaatcaacattgcgccaataatagtagctgttgaattaacatttagtccaatacttgcaataaaaattgcacaagtcaggacaattaaattttcaatatttaaagtcccatcggcactaatcttagataaaaattgagaagttaaataattttttcgctggcgtattatcatcttatttagtctaatccttatgaaaaaagcactgaattaagatttcagtgcaaaaatataaaaatgtagttgaacacatcaataaaattattataacttatttgatcctgaattgtcaaattaagtgcaacagttaggctatgaaggaacgtattgcttgaagagttcttctgctgtgtgatattggaggattcgacgatgtttgcggttaatggcatcagttgcctgttgaacataagcagctgacttatctttcatgcttttgcccttagggaagaattgacgcagaagtccattgcagttctcatttgtgcctctttcccaaggagaatatggatgagcaaagtagatctgacatcctttgattttggtcatatccgcaaactcagaaccattgtcaaacgtaattgatttaaaccaattaggatgtctgtcaatctccttttgaagcagtctttgacaagtactggcccgatagtcaggaattttgataacaacctcaaaacgagtggttctttcagtcagtgtcattaaggcaggttgatttttacgtctgacgcctttaaccaaatcgccttcccagtgcaggggaacttttctgttttcaacttctttaggccgctgttcaatcgaattgccaagattctttttatgcggagcatggccaccatgactatgatggcgtttgtttctgcgtcttttaagcttcattggcaggtcgatattgcttatatccagcaatccttgatcaatataacgatagacagtgggcgtgctaggacatggataatttggcataatcctgtgaaattcaccaacgaattcatcaatgctagtggcatcaaatttggctttaaagcgtctgcttagcattctgaaaaaaacggcatagtgttgcagtggattacacttatagcagtttctgcggcgcttttcatgataaatttgtgcagtatcagcgtaatagtgctcatacaagacatagctgctgtctctttgcaggacactgcctcgtctaatttcacggctgatagttgatttatgacagcctacttcttgagcgatagcagtgcaggaggttatgccagaatcaagcagagcttgaatttgtccacgttgttcgctgttcaattgatgataatgcttggaaatgctagaatttgagttggtcatgaagatcttcctttcttgatttttggtcacttcaagtttaggtcttcatggcctttttgtttaacaattagtgttgcacttcaattttaaatccgggtaacttatttgattaattttttgctcttataacaataatataaaaatgaattatctgctccatttcctactcgcagtgcgaaactgtcaaatcttttgtgtaaatagatctttctcgtaaattgattttttaattatttatttaatcaaagtaggattctaaggtgtcctgaacctgaccaaagcctttatgaattcggttgaaatagcggtcattgtagctcattgcctggatgccaataaatacatcaagcgactgttcagttggaaattctgccttaggcttagctttacgcttgatgacgttgttaaaggattcaatcatgttggttgaataaattgaagctctgatttgtttgggataattgtagaagaccagcagatcgggctcaatttccctcaaacctttgataacatggctataagctttattccattttgcataaaattcatgcaagacagctgcagcttctttttggcttgtctgttgatgtatctgcttgaattcgttcatgatcttttcgcggtcatccacccagactttagcacagatattgcgcatgacatgaaccaggcagcgttgaaaatgagctttaggataagtcctggtcaaggccgctttcatgccaacaacaccatcagaaagaaagagctcaacttgcttcaagcctctggacttcatgttttgaagcatctctgtccagacttcaatgttctcactaggcgcaatgcagtagtcaatgacttctttatgtccattaggtttaatgccaatggcaatatagactgcttcacgctcaaacgtttctcggcgcaaaggaaggtatgtcgcatccaaatagacacagaaaaacttgtcgcttagcttgcgcttgtgataagcctcaaccttggggagcatctgcttggaaatatttgatacttgggctggactataatgactgccatacattttctcaatcaagtcagcgatttctctggtagttacgcctttggagtagagcttgataatcgtgctttccaaaacatcagagtgctgcttgtagtcaggcagcgtgtgctgatgaaactggctgttgcgatctcgaggcacttgcacttcaattggtccaaactgggtatcaaccttgcggaaataagcaccatttctagagttgccagtattccagccatttctggcatagggatcatagcccagaaaggcagtcaattcagcttctagcaagttattaacagcctgttgtagctctttgcgcaataaatcgtttattttgtctggattgaatagagcttgtgctatatttttggtaaaatcattcatgaaggagttcttctttctgtatgtgtttttttgttcaaaccaatcatacgagaaaggaacccctttttctaatgtttaaagaaataaatttaaggaattattcatccttacacaaactattttacagtctccgcagtgcatctactttatcattattacttttatcttttttctttatagcaacataagtgtgtcctgaatcagctctatcactagaaagccaaccattggcagcaaaacctgctgttttataaaatttaaaatcagtagcttcgtattgagaggtaccaactttttgagctaatttataccccgactttttatcagttttagctaattttttagtccacttaatcgcttgattactgctcaacattttatataatttgattttattaaatgtatgcgttgtaattttaagcttctttattttgccttcttgcttatagtaccatgttccgcgagtttcctttggtgtagtaaataaattcttagctccccaggatgcagcatctactctattttgacccattacaataatagctaacatgaatagcgcagttgtcataaatataatgagcttatttttcaagtttatcacctttccttatataactcctattttcattatttcattaaaatatttcataaaagttaaaggggatgacagttcttttacttcttacttacaaacgtaaaaaatcaattacattagctttaccaaaaaaacgtatgcaataaagccatcttaattagacctggcatagcatacgtttttttattttattttttaattatattaattaattttctcttgagtatgacttaacatctgcatcaatttcattaataaaatcagtaaggctcttagaaatttcttcgtcagtaccgtaacgacgtacgtttacgctaccgttcttcatttcttcgtcgcctaacaccaaagtgtaaggtaccttttgggtttgtgattcacgaatcttgtaacccatcttttcgttacgagtatcaacttctgctctgaagccacgcttagcaagttcttgacgaaccttttctgcatattcaccatgagcatcaaggttaactgggataattttaacttgaactggagcaagccaagttgggaatgcacccttgtaaatttcagtaaggtaagcaatgaatctttccatagtaccaacaataccacggtgaatcataactggacggtgttcttcaccatcttgaccaacgtaagttaagccaaatctttctggaagcatgaagtcaagttggatagttgacatagtttcgtcattacccaaagcagtcttagtttgaatatcaagcttaggaccgtagaatgctgcttcaccttcagcttcaacatagtcaaggccaaggtcatccatagcacccttaagcatcttttgacttctttcccacatttcgtcatttgcaaagtacttgtcagtattctttggatcacggtatgaaagtctgaagtagtaatcagtaatatcgaagtccttgtatacgtccatgattaacttcaaaatcttagcgaattcagtttgaacttgatccaaggcaacaaaagtgtggccatcattcaaagtcatttcacgtacacgttgaaggcctgacaaagcgcctgacttttcatatctgtgcatcataccaagttcagcaacacgaagtggcaagtcacggtatgaacgaatgtggtgcttataaatttgaatatgtgaaggacagttcattggacgaagttcaagcatttcgccatcacccatgtccattggtgggaacatgtcatcacggtagtgtgcccagtgacctgaagtcttgtaagcatcaaggttcattaatactggagtataaacgtgttgataaccgtcagcaacttcacggtcgataatgtaacgttcaacaacacgacgaatagtagcaccctttggcatccagtaaggaagaccagcaccaaccttaggatcaacgaagaagaagtcaaggtcacgaccgatagttctgtggtcgcgttccttaatttctgcacgacgcttcaaatcttcctttaaagcagcttccttgaagaaagcagtaccgaagattctttgaagcattgggttggatgatttaccaagccagtaagcaccagcaactgacaaaagcttgaagtgcttaatcttaccagtgtttggcaataaagcatcaaagccaaagtcaacgaaatcacctaacttgtaagcatcaaccttgtcagcatcaattttcttcaaaagatcagtcttgtaagggtcatccttgaaaatatcttcaagttctgacttgtccattacaacatgttcaattgcttgaccactcttaactaatttttccatagccttttcaagttctggcaattcagtaaccttaatttggtcatctttgtcagtatctacgtaaaagccgccttcatcagcaacatgttgacccaaacgaagttctgggtacttgttcttagcaactgcttcaagtgcaaaagcagcagtagctcttaaaatgtctaagccttcttcatccttgtcagtaagaatagcaacttcaacatcattgtcaatttcataatcaagtggcttaacaacgccatttactttagcaccaacggcagcttttccaagagatgtagcgattgatgaagctacttccttaactgaaacagccttatcaaaatctttctttgaaccgtctggcaaagtaattgaaaaactcatatttttacctccaataaaaaaatcccagtgctaataaaagcactgggacgtgttaattgcgtggttccacccaaaattcaggttagcgtacgtctaacctctcgtatagattgataaaggtatccagcctcttaaaattcaattttgggaataaacaattggggtgattttctaatgaagaacttccagaactaggtccttctctctgagccgaacatcatcatgtctcgtttaattaacttcaattatacgcatcaaagtgaacgatgcaagaactttttgaaattaatgcgaaaaatttcgtcgatcgggaccggaaactactacttctttagctaaaaaacgtactcgttgcattaatcttttagctttaactggatcagttgcattacgggtttcctcaaagtgtgactctaatgcttccatatctaaattagaagagaaaaaggttggcaaaacattatccattcttgcctgtaaaattactcctaaaacgtcatcacgtgaccactgacttaatgtttctgccccaatgtcatccaaaattaagacatcgcattcagctaaattcctgatctcatcttgcaagctgttatcaccaaaatgacttgataaacctgcaataaaagttggaacatgtaaaaatacaacattccgatcaaaattagttgctacatagtttgcaagtcccgctagcatataggtcttcccgatcccaaagtcgcccgacaaataaaggccttgttggtgaggatcagctttgtactttttcaaaaaatcataaatcagggttaaagcttgctggcgatcatttgtaacctcaatatcacttaaattaacatcatgcaatttagcaggcagatcaattaaatgaagacgccgcttggctgctcgttgctgatctgctacaatcttagcctcggtaggtttataacgtacatcaattactttgccgtttaaaaataattgcggagcataaccggccagcacctgattctgactatgtttttgcgcataatattcatagatattggccatactatttcgaatcatcgccttatctattttttccctatttgcctgcaaaaacgcttgcacatctggatcgtgtaaagcagttttcaacagttctttctcattacctaaattacgctctttaactatttttttaagcaaatcaccaattgcttccattatttcacctaccctctatttacttatttttcagatccttaaagatatccttcagctgttctgttgacataccttcatttttagcctttttcttgctccaatcggtacctttttcgactcgcttattttgtcgatatgactgtcgatttttctttttaagaatatcggctttacgcttcttcacatattcaagagcttgtaccccagtactaataccaccttgcagccaatcattagctattcgataagcacgattagaagttacaacagtatcgtaggtcaaacaggtatgaatcaaaatattaatcaaatcttccggcaagccatactgcgtgtgcagctgattaataatatagttttcgcctggagctacaattccacccttttcagtttttaatttgtataaaaattcagatggggaattttcattagcttcgagtaacagttttctatcattagcatccaaacctttgatagtcgcaatagcgcgctttttgccttcttcaatttgtttttgaatgttttccctagtatgcaatcgtttataattttctgctatggtattactaatttcatgcatgtttaatttatgtgtaccatgcaaacagggaacagtctcatccacaaattcctgttccgataaattatatgtctgtattaagccccgaatttggttctttttaatttctacttcttgagctggaatttgatagacattatattgatctttaatcagatcccaatcaattggatcctgggcattaatttcagcagtttctatctcaggcgctttattttcctgcgcagcttctactacctcattagatggattaattgcttcatcccctggcaagcgaaaaacatcaaaaaagttggctgagacatcgcgcgcattcttgattggcttttcacgcagttttgcttccttagcaaaagcatgactcaagtcatgaaaggttgggctgccaactttttctttcaacaaacttgctagcagtggtgttgcaaaaaatttgtctgcactaggaacctgtaataacttaaaaacaatgatattattgaagacattatccgctaaaaaagtttgcactaaacctacggcttccagtttatgcaaagaatgaaacatatcttttaaactacaatcaagttgctcctgtagtgaataaattccctttgaatcagaaacaataccatatggatcatagtcattgatcaaagtctgatacaaggcaattgccaccgcgccaaccaaaggctgatacagtttaatcaagattttctcattctctggaaaaagggtaatcttgttggctacataataaagatgcttaggatcagacgttgcgaacatgactaattaccctttccttttttggccatcatatcttccattgtcttcataaagctagacatatccttgaactcacggtaaattgaagcaaagcgaatataagctacgtcatccaaattagccaaatcatccatgacatactgaccaatcttcttagatgaaatttcactaacgccttgttttcttatcttattttcgacacgatcaaccaattgctcaaattgttcactactgattggccgtttttgtccggctgccattactccgtgcaaaattttctttcgactgaatggttcacgagtaccatcattttttactaccaacaaaggagcagtttccactcgttcaaaagtagtaaagcgaaaaccacaattttcacattctctgcgccgtctaatagcccggttttcatcactaggccgcgaatcaataacgcgagaagcattttgatgacaatttggacattccatagctatccctcttctctaatctttaccaataattgtgctagtttattctctagttcttttattgtaccagtattttcaatcacaaaatcagccaattgctcttttttgaccataggcaactgactttgcatccgaattcttgcttcttcatcggttaaatgattccgctccttcaaacgctgtaattgcattttctcaggcaaagtaatcactaaaacaccgtcagctatatctttcttatccatccctgactcaaaataaagtgggacatcaagaataactattggttgagcttgatattgatttagcaatttctttgtttgcaaaaaaatcaacggatgcgttaactcatttaatttagttaaagcccgcgaatccttaaataccaattgccctaatttctttcgattaatcgtttggtcatcatttaaatactctgagccaaaataatctttaatcgcctgccaagaagcttgcccaggctccatcaaatcatgagcaatctgatcatcatcgatcacaggaattttatttgctttaaaaaactggtccgctgtacttttcccagttgcaataccaccagttaaggctaaaacatagctcattaataaaccacctgacaatgtggacagaaggttgtccctctgcctgatactttaatcttttctagttccgtgccacactttgcacaaggttcacctgcatgaccataaaccttgagcatttcttgatagccaccaacatttccgttggcatctaaataagtatgaacagtcgtcccacgcttttttgttgcaattttaatagtttggttaatattctgccacagctcttttgctttttctgctggaattttatttgcggcactcaaaggatgaattccactctgccacagtgtctcatcaacatagatattacctaaacctgcaacggttgtttgatcaagcaagacatttttaatatttttcttcttacggctcaaggccttgataaaataatctgacgaaaattctatgctattaggctcagggcccagtttgccaatccccgtcacttggcgctcagtacctgttaaaatcagctgcatgcggccaaacttacgcacgtcattataacgcaaggcagtttgatcagtaaaaataaactctacgtggtcatgcttatccttaggcgcatcgggagtggttaaatgatattttccctccatgcgtaaatgtgacacaatagttaaattatcacttaggcgtatcagtaaatatttagcatagcgatcaatctttaagacccttttacctggtagttctttgataaatttcttatggtctgttgccacaattttgggataccaaagtactacttttttaatcgtttttccaacgattagcggagttaaagtccgtcgcaccgtctcgacttcaggcatttctggcattaaatcacctactttgcatcataccaattatgaccccaaccagaatctgcaatcaatggcacatcaagcttcactgctgattgcataacttctggaactatcttcttaatcgtttctaattcatcttttggcacatcaaaaatcaattcgtcatgtacttgaacgaccatcttggtcttcaaatgtagttcatctagcttcttttgcatattgatcatagcaatcttgataatatcggccgctgatccttgaataggcgagttaatcgcagttctttcagcaaaagaacgaactgtaaatttcttagcatgaatatcaggcaagtagcgtcttctgtgcataattgtttctgcatagcccttttcacgagccgtttgcacagccttatccatatattcacgaatttgtggatattgttcaaagtaattgtcaataaactcttgagcacgttttctagaaatacctaaattctttgataaaccataatcagaaataccataaacaataccgaagttaacggctttagcatgacgcctcatcaatggcgttacttcatccggtgaatctaaatgaaaaattctcattgctgtatgtgagtgaatatcatagcctgtcttaaaggcttcttgcatattctgatcaccggaaacatgtgctaatacccgcaactcaacttgggaataatcacaagagaagatgtaaccatcaggattggttggcacaaaggcttttctgatttgctttccttcttcagttcgtgtaggaatattctgcaagttaggatcaacactagaaagtcgaccagttgctgtcaatgtctgtagataacgcgtatgtacgcgaccatctggctgaatcacatcaagcaagcccttgacataagttgattgaatcttagcaatttgccgataatctaaaatttcactaacaatcggactttgtgtctttaattggtctaatacctcaacagaagtggaataaccggtcttggtctttttaattactggtaaattcaatttttcaaacaaaatatgacctaattgcttaggtgaattcaagttaaagcgctcgcctgcttgttgatagatcttatcctccagctcttttaaccgaacagcaaattcattttgcagttcgagcagagtacttgcctccactttcattccgttgatttccatccgggctaatacacgagcagtcggaatttcgattgtatcaaacaagtcatcttgttcgtgttccttaagcttctcaagtagtggctgcttcaagttttcgatagcattaacctttgaagccaaatgattaaatagttcttcatcgtcatcaggaacatgctcacttttgccttttccatagatttctatatcggttttaactgaataatcaccatacaagtgagcaatttcacctagatcattggaattattttcattattgatcaaatatgaagctaacaacatatcataatcttgaccgtgaacatggatacctaatcgatgtaagccaaccattgtccgctttaaatcaaagacatttttcttaatttgctcatcttctaataaatgtcgcaaattagtctcttgtaaaagttcaacatctcgtgaaacgtaaatttgataattgatttttaaagcaaaaccgacaaatggagcaaggtgatagttagcacctagcatagcaagataaaattcaatttggtcatctgcattagctttgattttcttgacattttggtcatcaagaactgtgtattcaactttttctacttcagttgcatcttggccttgaccgctagcattcagttctgccaagaacttacggaaattcatcttttcatagaattggcgtaatttttcataatcaattggttggcgcttaacgtcatcaatatcaattgtcacgggagaatgacgatcaattgtagccagttttttgcctaaaatagcattgtgtttatcgcgaatcaaacgttcttttcgtttagaagctttcaagtcatcaatatgatcatacagattttcaactgtatgatatttttggatcaagttagaagctgttttaggaccaatcccctcaacgcctggataattatccgatgaatctcccattaaagccttcatatcaatgaattcagttggcgttacaccatttacttccttcatatgttcaggagtataagcctcaagctgtgatacacctgacttagtcacttcaaccgttgtcttgtctgaagccaactgcgtcaagtcacggtctcctgttacaattgtagtaataaaaccattttcttcgcccttagtagcaaaagtaccaataatatcatcggcttcataatcttttaattcataagtcttaataccaagatcatgtagcatctcttgaatatacggcatttgttctaacaactcttctggcgtcttagcccgaccacccttgtagtcaccgtacattttagttctaaaagttactttgcccacatcaaaagccaccaacacatgagtcggatcgacatcttttaagagtacatcgagcatatttttaaaagcataaatggcattagtatgcaaaccatctgggctcttgaatgattctagttggcggtaaagtgcatagaaggctctaaaagctacggagttaccatcgattagaagtaattttttatcagccattttatctcccttttaacaaatagatctattcttttacttatctattttaccagttttcatactaatctttcagcatgttgttttagtaaaatagtgaatctctgttaattacgatttttactcaaaaatttaattaaattctttgtcaaaaaaggattttatcaatcagtaatcaaaacaaaaaagcacgtaagtgcttttccatattattcagcgtcatcctgactgccagattcatcccatactttctttaaagctggaacctttcctaaatctgtcatctcatcttttccaacaacaatcaagttgttcggaccttgtgctaattgattgaagctgtctaagctttgatttctgaagtagccttccccagctttagctaaagcatcctgcatcttttatacacggtatgcatcagcatcggcttgtgttttaacagcttcagcgttagctttagcagttgcaaccaaagcatcattcttggccttagtggtcatttcaatcgttcttgcttcaccttcagctttggcaatagcagcggtcttctcacgatcagcagtcaattgtttgtccattgctctttgaatttctggacttggtaaaagttcatcaacgtttactctgacaaccttaattccgtaaatatcagttagatctccagttgctgtaaacaattgatcattgatttccttagttgaacctaaagccgcattcaaatccattcgaccaatgatgtcacgcaagtgaccacgaattaattgcaccattgactcaactgaatcggtgttgttgtagaagtagcggtatgaatcagtaactaagtagttcagagtcaaggaagtagtaatctctgcattatccttagtaataattgaatactttgaaatttctaatggctgcaatgccaatggaactttccgaattcgttgaaataatggccaaacaaagacaaagccagccttaacagttttagaatatttacccaacgtttcaactaagccttcattattttggggtacaattctaaaaccacaacaaatatatgcaataactaaaactaaaacgattagcgtaataacaatacccatttttatacctcaactaaaaattactcgtccttcttcttgggatcgactcccttggctaattcacctagtgaactatcggtctgctctgccaagcggttaagcttttcatcaagtagatgagcatactcatacttgttcatgtagtccaagttggcccaagcattaggaatctcaactctaaaaggaataccattacgtaaaataatttgatcataaaacatattaattgcagtagctgaattcaaacctaattgctttaaaattgcttctgctttttctttcttttcaggattcattctgacataaagtccagttgttttctcagccatggtaccctctcctttctatttaccactattatatatcgtttgcatataaattgcatagcttttttacaaaaataaaaagactaccttttgcagtagtctcaagaatctaattttagcctaaatcactaatgtggaaaatttgattctccaaagttcttaacttaaactcgccatctttgacatatttttggtggtaagccacagttagataaatgtcatctggcgcctgaacatgaatactttctacttcactgtagcgatcaggcaaatcaataccatcaatcattgctacttgccagttctctggattagtttcaccccatggaaacttaacgatcttacgtgaccaagtagtaacttcaccattcgcatgatcaatcttgggtgacaattggttagaaatataaatattcttgtcatcatcaatggcgtagccctgaacagaatcaatcatttgtggagcttcttcacttggtgccacgcttggatgatcaaagttatcaatgtgaaaagcactaaggcaatgcaaatcagtaattggcgtgttcttagtgccattttcattcaacttttggtttacttcatttaagtcaaacaaaccaaagtgacctgaaccatcatcccaaattgaagcaatcatgaagtacttgccatttggtgaaactgaagcttctactctgtgcaagtgatcatgaccatcataaggaacgtcggttacgtgattcaagtgtgacaaacgtggaagttgtgtatttgaagtatatctttctggtaaaagtcttgggtactttactcgtgcaatttgagtagtccagttgcctgaatttggtttagcacctacgaaatattcatccttgtcattagctgctacccaggtttgcgtgtggccaaagcccatcattactaagtgtggatcagtataatcgatgttcttagttaaaccttcatgttttctataaaccaacacatcatgtgcactgtgaagaagttgcaaggcaaaaacatgatcaccatttactacaccaacttgggctacaacatggtgcatcccattcaagcgataaaacaaatgaggtgtaatacttttaaccattcttatttatcttctttctttatatctattcattttcacttatacataaattatatcctatcatcaaaaaatagattgactttatgctgataacttccaataattagaataaatttttcttggagggaaaattatgaaaagaagaacaacacttttattgtcgagtgcagtaaccattgcggcattatttagcttcaactcaaaagttcaagctgcggctgatcctacgatcaaggcaacaaattacaacatgatcgtgaagttggacactcgcaagaatcaattaacagaaaaagttaccatgcacgttgttaataacggtaatgaacctgttaaaaatttattggttagaaatattgctagcggcgtgttgaaatacgaccacaagcattttgaggctacaagaaatgcgacaacttcagttaaaagcatttcatcagatggtcaaaagctttcttacactaccggtaaagacaagagcaatttatttgttaacaaaagtctaaatataggtgaatctactgatttaactgtcaacgtagttaccggcgtgcctaagagacaagatcgttttggctaccaaaatatcaacggcggtaaggtttataacctgtcattctgtttcccatacttaagcgattatcgcaacggtaagtggaattatcacccatactacgatgctggtgaaaaccgcaacagtgctgtaagcaatttccacgttagcttcttcgcaccaaagagctacaaagttgccgcttctggtcaaagcacaaccaaaaatggcaaaactacaattaccgccaacaacatgcgtgagttcgcaatcgctacttccaacaagttcaagattgaccacgcttatgcaaacggcgtaagaatcaacgactactaccttgcaagcaaaaacagcaagcaatacaacaagcttgctttgatgactgcccaagacagttttcacatttttaccaaaaagatcggcaaatatccttacaaagaaatcgatattactgaaggcttgcttagcaaagataccggtgggatggaatatcctggcttgatcatgatcgatgccagcggctttttactaaagaagcacccacttgatagatataatgaattaactgaagatgtttctcacgaagttggtcaccaatggttctacggcactgtcggcagcgacgaatacatggaaccttggcttgacgaaggtcttaccaacatccttgaaaatggcgtttacgatttgacctacactaagagtaaggcttactgtgctaaactgatgcacagcaagttctatactcgtaagaacgtcaagcgtgctaacaaaatcttaaaagaaaatgctaaccaattcattaataagaatcaaaaggccaactacatcaactaccctgttaataatccaccaaagggcgttgacactgaagacatggcttacgaacttgggatggacttccctgctgttttaaaggttgccatgggcgaaaacaagttcttcgatgctttacacgattactatcaaacttactgcttgaagcaagcaactgcacaagacttcttgaacattatccgcaagtacaataattcaaagaaggttaacaacgtgatcaataaatttattgatcctaagtacttaagtgaataaaatcaaataaccccgaaaacgtttgagtttcgaggttatttttatagtctcataagtgctaaaatcaacttaagggattattacaaaggagacaaaatatgactactaaaaaattagcaactatcgcagcagctttattaatcagtgttgcaccagcagctgctattatcaatcaacctgttcacacagttcaagcagctacgcaatcacaaaaaggtaaagttactctcaagaaatcctttaacggcacagttcaagtcttcaacagcaaaggcaatgccactaccactacccaaaaagtcaatggcaagaagatgactgttgcttcaacgattaaatcaggctcaagttttaaatattatggcaagcctatcctgatccaaggtaaaaaagtagatgcaaaaacttctaagaactaccactacactaccgcttcttacgttaacatcggtaaaaaacgctacatcaaatctttgaatgttagctcaatggatggacaaaatgttttaatcttgagttccaactctcgcatttatgataaaaacggtcaccgcactactttcaatggtttgtcactcatccctaaatatatgttagttaaaacaccagctaaaacccacgccacaactaagaatgacgtattttactacttctcaaatcttagcgggtctaaaaagagaagtttgaacacaaccactatcaagggtaagccattctacgccttaggtaatggcgcttatatctatgcttcaaatgttggctttgtcaacggcaacaccctttaccaagcttctggcaccactaccgccactattttaaacaaaatccatgttttgaataataagcttaaatcaaccagcaagttgctcaagattggtcaaaaagttaaggtagatgccaccaagaccactggtgaaggtgatgaagctggcctttacttcagaattgctggcaccaaaggtaaaaacgcacaatacatttactggggcgacgatgccgaatatggtatggatcaagaaagcactactgatgaatttcaaggtaactttaatttagataatcacctcgcaaattaacacaatatgctaaaattaaataaatgatataacgtagcgacctagaatagtgaggtttacctcaaagtatctttctaggtcgcttttttcaatgtggggggaaaatttatggatgaattatttgctaaagcgccgattaaaaggtctactttaagctagcattaccggtcgtcttagggatgatcactaccatgatctacaacttggcagacacgatgtttgttgccaaaacgggtgatacaaatctagtagcaggaattacgattggtgctccactttttacttttttaatcgctgtttctgacatttttgggctcggtggatcttcactaatttcacggctattcggtgaaagaaattatcaattaagtaaacgtgtaagcagtttttgtatgatcggtggatttgttactggtttaatactaacagccattttactaattttagaaaatccgatccttcatcttttaggagcaaaagctgccacctatcaagatgctgccgatttttatcgtgtaatatcaattggtgctgcgccaattatcttctcaatcattccgcagaacttaatcagaacagaaggtttagctacccaagcaatggttgctacaatgacgggaaccattttagctatcatccttgatcctattttcttgtttgttttcaaaataggtgcaatcggtgttgggattgccaacgttacaggttatctagtcactgatgctattctcatttactacgttttatacaaaactgactacatcaaattaaagctaaaatatagcaaaattagcggcaaaacaatcaaagatatcgtagcaatcggcatccccggttcaatcaccaacttcgctcaaagctctggcatggcacttcttaactcatctttagctctatacggtgcaaacaaagttgccgcaatgggaatcacccaaaagatttacagtatcgttatcttggtaatcgttggttttgcctttggttcacaacctttaattggttacaactatggtgctaaaaactggaaacgattaaagaaaattctaaacttcgatattcttgtgcaagttgtttatgctgtaatttcaggcggattattaattttatttgctcgtccagtcaccgctctatttatgaatcaaccagatatcgttaacgctggtaattatatgttaattgccactattattaccacaacaatcgttggtatcattttagtttacactaccgtcttccaatcagttggtaatgcatgggcagcgtttatcatggccatcgttcgccaaggcgttgtctactttatcgcattagaaattctaaaagtcacatttggctaccacggtatcgtttgggctcaagcagccagtgatatcatcacctgcatcatcggttactttatttatgaaaagagcctggatctcaaggataaaatcaaagattagccaaaataaaaactgctctcttattgagaacagtttttttcatgcttatctttcaattaaagcaatttttcaaaagcatcttcatacttaggaatatcacctgcacccataaagacaatgactgaattcttattcttagtcaagtcagcaatattgtctaagtcaattacttctgagccaggaatattcttaaccaagtcttcacttgaaatatcaccgttagcttcacgagctgaagcatagattggagttacgtaagctttatcaacgtcacgcaagatttcttcgaagtctttttgatacttcttagttcttgagaaagtgtgtggttggaacacaacaaccaacttcttgtctgggaacttttggcgagcagcttggatagtggcgcgcatttcagttgggtggtgtgcatagtcgtcgatgacggcaatgtcgccgaagtccttttcactaaatctacgcttagcacccttgaatgatggcaagcccttcttgatgtcttccattggcaccttttcggtgtaagcaacggccacaacagcagtggcgttcaaaattgagtggtcaccaaagaggtgaatctcgaattcgcccaagtccttaccgtgagccaaaacgtggaacttagaaccagtagtcgacttctcaatttgagtagcttgaaagtcatcagtatcattaaagccataagtgtacttaggaatatcggtcttcaaactttgcaaacgcttgtcatcaccccagacgaacaaggccttcttagtttgatcagcagctgattgaaaagcgctggtgtaatcggcttgatccttgaagtagtctgggtggtcaaagtcgatgttagtcatgatttggtaatctggatgatatgccaaaaagtgacgacgatattcatcggcttcatatacaaagaaacgtgaaccagcaacgcctttaccacgaccatcaccgattaagtatgaggtcggagcgacttcaccgagcacatgggctagcaaactagtagttgaagtcttgccgtgcgtaccagaaacaccgattgaagtatgactttgaacaacttcttcaacagtatctgggtaagactgccacttaacatctttgtctaagcaagccttaacttctgggttatcttccttgaaggcatttcctttaacaattacttgctcagcattgctcttgatattagctggatcaaaattcttaacttcaattccaacctttttaagtggaacttgggtgaaagtgtatttctcgatgtcactgccggcaacattatagcctaagtcatgtaaaagcagtgccagggatgccattccagtacccttgattccaataaaccaaatttgcttatttttatctaacattatttgtccctcgaaatttcaacgtttttattcgttaattattttaccatttttcttatgctaaaatttttaaaatcaaaagaaatctatgatgaaaacgacaattatgttaatactgtcgatcatttgatcattaaagaccttacgggtaaaactatttcccacaaaattggttcactagctccttaaaaggtgaaactggtggcttttcttagacaaaataaaaaagttgatcaattagcttttttgcaccaactggttaactttttatttttgctttattcaaattataaagtaatttcaccactagcaatcaattcatcacacttagttggttcaaattctgcaccaacttcgaagctatcaggaacaaccatgatcccgcgcttttgtggtgcgtgtggcaaacctaattcacgagctgaacaaatcatgccgtatgaatcaacaccgcgcaattcacctggccaaatttgtgcaccatttggcattaaagtacctggaagtgcaacaactactttttgaccttgagcgatatttggtgcaccacaaacgatttggtgttcttcaccatcagcaacctcaacagtagttacgtgcaagtgatctgaatcagggtgtggttcacaagtcttaacgtagccataaactaaagttggcttgccatatgctaacttgtcagtaaaaccaacttcatcaagcttcttgttcagtgcaacaagctcatcgtctgacaacttaactggaccatttggtaacttatcaaagtcaactaacttatcaacgttgaagaagttgtaaccaatggtcttgccttcatcgttagttacgcgagtaacgtcttctttttcctcaaatgagctacggccttcatcgtgacctaagataacgatcaaagtgttaggataagcttctttattagtactagtaatcatgcttttttttctcctctattagtcaagtgatcgtaaaaagttttccacttcatctttagttttacggtccttatttactagtctaccaatttctttgccatcttggtagacaacaaatgaaggaattcccataatcattaatttttttgctatgtcaattgaaccgtcgcggtcaatttcgtagaattttgcatcagaaaaatctttttcaatttcaggcataaatggagcaagaaacttgcagtctgggcaccaatcagctgagaattcaagcacagtacgtccttctttagtaatttcctttaattgatcttcagttaattctttaatcttttccatttttcatacctcatgtatttcttactttttataagttgatattattataaccattctttaactaaaaagctagaaattgagtcttacaattatttcttttctttaaatagataactgccccaacgaactggtttttcaacagttggcaaaaccatgaagtaaagtaaaaacaaatacccaaatggaataaccgagatccagtaccaccaaccggtgtggtcagtatcatgcaatcttcttatggtaaagccaagtaagcctaataagatccaaataatcagtagatagataattatttgaataataagtgtaccagttgaaacgtgcgttaataagaagaattcattacttgaataagcaatgccatcaattgaatatgccgtagctgaacatgctgctaaaatgactagcaaaataattgcccaaacataggcataccaaaatccacgacgagtactacgtgcattctacttaaatggtgcagtaaacaaaagtttgaatgcttgtccaaaagttggtctaggaatatcagttttaggttcgtgatattcttgttcataataaggtttatcttccataattttccctccaataatctgaaatcttacagttctattctaaaacaaaataactaaagcgatgagctagtagcaagattttatccaataaagcattaaaaaacgcctagagtttatctgctgtaactctagacgcttcaaactattcatcctcaaaatgagcgtgcaaagcataaattggattacccttagctgcaaatttatgctcgtattctgtttcaatattcttttccacaatctctggcttttcatgatgaagatcaactgaaacaaaatcaaacttcattccataattattcaagctctgaacagagtaagcatacaagcccgcattgtcggttttaaattcaatatgtccttctggcttcagaacttgttcatacttgctcaaaaaactcttgtaagtcaaacgacgcttttcatgacgagtctttggccatggatcgctaaaattcaagtagataacattggtgctatttgctggaaagaagcagttgatgtcagccgcatccccgcgtaagatttgtaaattatccaagcccttttccaactttgttcgcaagataatccccgcagccgtagtttgcaattctaatgcaacataatttttatcaggattttgttcagctaacgtagtaatgaaatgccccttaccagaacctacttcaatttcgatgggatgatcattaccaaatcgttcagtccagtcgatctttttttcaggatcaggattttgcaaaacactttctggatggtcgtttacaagcttaacagcccaaggtttatttcttaatctcattctctattcctatctaattccaaaatttttttgattcatttttttaactctgcctggcaagtaagtggcagttacaatcatagtgaaaccaagtaaaattgccatcgcttcaaacaagttaacattaattggtagcacaattaaccagcagacactaatcaagagccattgaataaacaagcccattgtcaacacctctaccaagtccctgccacgattttgccgttcaattgggtaaacgcggtacatgaagttgcggtcaaactctgttgccattggcaataattgatagaccgttaaaaagattaccaagcatgaaaggcctagtgcccaacgccaatcttgcactaaccacgataccaagattgcaaagacagtcattctgactaataagttcaagtattctggattacgcaaaagtgatctccgatacaagaacaaattaggattttccttagccaatgattttggtaaaagaaagtcgaggtatcttctgcgtttgattgtaacttgcttttctgccacatcggtaaacatactgaagattgaataaacgcgatcttttctagcttgttcagttttaatcgcatagcgccagttaaagacgcccttttcttttttagtaccaaaatgcgtaattaccattaatactacaacttcaattggataaataaatgatcctagtgagccaatcaacaaagccgccagagttaccactaataatatccattgcggataattgtagtagaagtacaaactctctttttcaatcagcaacatacacaattttaataaaacagtgctgataatcaggattacatatgaccaaactgggattccagcctttaccgtcgcaaacggaaacagaattccgccaagcaaaacaatcagaattgttggcagcaccatactgtaacgaatcatcggcttcagatattcacccatttgttcatcttgcgtaaacagaaattgcatgtcggcctcttttaataaggtaactaatcgaccagctaataatggcaaccacatgataaagccgacaagtggcttatagaaccacagattattgggaattacgcgcatagcttgggcataccagaacatcagcgccccaaacaaaaagatcaacgctaaaataaagaagtcattaaacaccagcgtcaaatattttactgattgtttaagattctcgctcaaccttctattcgctaactcacgcattgccattatcctctctattcaaagcaaggtataacttgtcaaaaggatcatctggcttaaggccatagtgctgacgaatttcttgcaaactccccacaacttcgatcgtgccgcggtttaacacagcataattcgaaatcgcttgctgtgcatcagctaaaacgtgagtagtcattaagaccatctttttgtcagcaattgctttttttattaaatcgattaagttagcaactgccaaaggatcaaggccagtaaatggttcatcaattacaagcaaactagtatctgctaaaaaggcagagacaatcattactttttgccgcatccccttagagaagtgaatcggcagccattctagcttgtcatcaagtctgaacatcttaagcagctcatgtgcgcgtttccatgctttattttcatccaagtggtaactcaacatggttagctccaaatgttcctttaaagtcaattccggatacaaaatcggtgtttctggaatataagctacttcacgcttaaacttagttggttgctgcgtcaatacaacatcgttcaagctgatcttacccttttgcgggcgaagtaaacccaaaatatgtttaatcgtagttgacttccccgcgccgtttagcccaatcaagcctagtgcctcacccggcttaatttccaaattaatatctttaataaccgggacacccgtgtagcctcccgttaaatgttcaatttttaatgtcatttttcctatctttctttactgaatttatacctttattatgatagcatggatttaatagtaaactaaagtacaaggatatgaggttttattatggaaaatttagacaaagattgtttattctgcaaaattatccgcggtgaaattcctagctataccgtttttgaaaatgacgatgttaaggccttcttagatatttctcaagttaacccaggccacaccttaatggtgccaaaaaagcacatcgttaacttgtttgactacaccaaggaagacgcacaacgctatttacaatatattcctgaaattgctaatgcaattaaggcagccttccctaatgttactgcaatgaacattactactaataatggtaaggccgcaaatcaagtagttatgcactcacacattcacttcattcctcgttttgaaggcgatggcttgaagctgatgacccgcaacaacgctgacaaatacgatgaagctaaatacaacgaagttgctaacaaaattaaggcacaattttagaggttaaaaatgaaacatttcttattaggcacagtttttggtgcaacagctgggctagttttttcctgtatgaaagatagcaatggtaatcgcccaggcaagccattaaaagatgagttcgaagcaattaaacatgaaagccaacgctttaattctgccttgcaaaaagctaaaaaggctagtcaagaattaaatgaacaaatgccaacagctgaacgtacaattagtgatattaatgatagtgttgaacattattccgaccatattcaacctatcgttaaccgcatagaaaaaaagagcgataaattgaaccaagatttggaaaacatcgtgccagatactaactcacaagacacaaagaactaagaaaaaataaagaaaatttgatttttctgtgaaaattcgtaatttgaaaacgaaacgcccttttttatggtatattaatgaacagttacttatttaaggatgtggagatattatttttatgaagagttatatgaaaaaaattgctgcagtcgtagctgtagctggcgttgcattatcaactgctgcttgttctaatagcggcactaaggctactgttgcttcctacaagggcggtaagattactcaacaacaatactacgatgaaatgaagaagtcacaagccggtaagtcaactttggctaatatgattatcaaccgcgctttggaacaacaatacggcaagtacgtatctcaaaagaaagtcgacaagcaatacaacaactacaagaagcaatacggctcacaatttagtgctgttttacaacaaaacggtatgactgcttcaagcttcaagcaaaacattaagactaaccttctttctgaacaagcattgaagcacattaagaaagttactaagaagcaagaacaacaagcttggaagagctaccaacctaaggtaactgttcaacacatcttggttgctaagaagtcaactgctcaaagcatcatcaagcaattgaaagatggcaagagcttcaaggttttagctaagaagtactcacttgatactgctactaagaacaaggctggtaagttgccatcattcgactcaactgacactactttagacagctcattcaagactgcagcattcaagcttaagactggtgaagttacttcaactccagttaagtcacaatctggttaccacgtaatcaagatgatcagccacccagctaagggtaagtttgctgatcacaagaaggctatcgatgaccaaatttacgcatcaatggctcaagaccaagctactatgaaagacgttattgctactgttttgaagaaggctgacgtttcaatcaaggatagcgacttgaaggatgtattatcatcatacgtttcaactactaagtaacaaatatatttagttaatcaaaaacgccgaatctgaatggattcgacgtttttttatttcattaatttatttttttaataggggcatcatattcccccccagtaaaaaaactatgccctcactggcaccttcctagtagcagctgagttggcataaataatactttgaaattcattatgaaaagcttgagcattatgcaatacagctttataatcatcatttttagcaggtccaactaatccgccacctacaccaacaacataggcaccactagcaaaccattcatgcatatttcctaatgatacaccaccacttggcattacattaacatatgggaaaggtccatgaatttcagaaataatgcctttaccagcaattgaacctgggaagattttgactacgtcagcaccataagttaaagcagattgaatttccgttggactaaagcaaccgggcatgtaaggaaccgcatacagattgcattccttagcagtattttcgttaaaagatgggctaacaacgaatctagctcctgaaacaatcgccattctagcagttgcctcatcaagcacagttccagctccaatgagtatccaagatttcggtcttggatatttttttactacaaatcaaaaggctcaagatgcttcatcattaaagcattcttgagctctttaattttatttatcagtagcataatcagacaacttcaagtagcgtacaagttcactcttgaaagtctttttattataagtcactaccgcaattttacctttataaaagccagcatattctttttgtaaatcaccatggatatcacaattagccaatgaaactacccaagacttttctgccttagttagtttattcatgtttttaacccaaactttttgtccgtctaatttactttgatcgtatttaatttgccaactagcctgcttaactgccgcaatagaagtattcttgttagtcaataacttttgtgcgttatcaacggccaaatcatatctttcttgctgtgctttttcagtcaaacgatataaagtcgattttttaatttgacctgctcgatcaactaaggcttgcaactcaccatagtcactagcagtggcctgacttgcatctgcttgtgcttcgctcggtgtattatcaacttttaatgcaactggattttgacttgtcacatcactagctttaacaaaagtatttgctgtatctttagtttggtgagcatatgagccgttgctggtaatcgtagtaccagtcttgcctgttccatcaagagctggaacccagaccaattttttgttagccgtaagatgataatatagatcagcttgtttagtttgcttgttccaaatataaagagctcgatcaacgccaacattaacatctggaatcaataaataactcttatcaacgatttcaccgtcaatattatagagatacgttgagttaccggcaatgacataattatcttcagtagatgcagctaatgcaaaattatttggcataatccgagttgactttttgatagcaggtaggttgacccacttatcagtacctttaatccgataatattccagactactcaaataatcatcagcgccgtcaacattatgataatagttctgatcaactgtaagcttagttcccttcttaattggagcagcaattggcatccctatttgattagttactggagcagtctttttggtaattaccttaatttccttagttgacagatccgcatattgatattttcctggcgagattctaccaatgttgcctggcttaatatatttatttttgccaatattaacaaagtctgtcttcttgatgcttactgtcggtaacgaaaaatacttgccagctaatacattattgaagaaatacctgctttgatttgggttagtaattgccttaggcttcaatatagtcacctttagtaactttcccttcttaatcttgctcttggtacgcttaccttgatgattgtaaacataggcattgtggttaatatagaacgttaatttagtagtttgtgtattatcttgacttgcggcaacaactggattagacaaatgattatttgctaaaacaggtacagtcaacattatcgtagctgccgatactaaaattaatttttttgatgctttcatttttattccctaccctaatttttataacatctttagcaattcaatgcatcaaaaaagtccaagaggaaatcaatgtatacctcttgaactttttatcaataaaaaaatagaaaggagacaagtctctaatctatccaaaaacatctctgcttttcaattgtataaacatgttattattcttcagctaatttgtcaataactttgttcaaaaaattattgacacaatttttcaccaaaacaaaataagcatccctgcaaatcaaccgcagtgatgcttatttcttattctaaatgttccatattgcctaatgctagaactaatattatttacaatttcagctcaacacctttaatcaactatcacattgccaatttaaatttggaaagccattgctctctttctgaccaagaataaacaggaatattatagttcttaaaggcagacttaaaatcactagaaacaggactattaatattgttcgcaataactgaaaattctgttttaggttggctttctcgtacatcaataattctaaataaagggttagctatattagaattaataggcgtattcaccaccttaatagcttgttgcggtttttttcttgtacgtccaaccacaatatcaaacttagaattccgtccgctttttcctagtaaactcaaatcttctcctactggaatattattatcaataaaataatttgttacatcttctttaaaatgaaactgtcaaatcttttgtgtaaatagttctttctcgtaaattgattttttaattatttatttaatcaaagtaggattctaaggtgtcctgaacctgaccaaagcctttatgaattcgattgaaataacggtcattgtagctcattgcctggatgccaataaatgcatcaagcgactgttcagttggaaattctgccttaggcttagctttacgcttgatgacgttgttaaaggattcaatcatattggttgaataaattgaagctctgatttgtttgggataattgtagaagactagcagatcgggctcaatttccttcaaacctttgatgacatggctataagctttattccatttggcatagaatttgtgcaagacagctgcagcttcttttttgcttgtctgttgatgtatctgcttgaattcgttcatgatcttttcacgatcgtcgacgcgtactttagcgcagatattgcgcatgacatgaaccaggcagcgttgaaaatgagctttaggataagtcctggccaaggctgttttcatgccaacaacaccatcagaaagaaaaagctcaacttgcttcaagcctctggacttcatgttttgaagcatctctgtccaaacttcaatgttctcactaggagcaatgcagtagtcaatgacttccttatgtccattaggtttaatgccaatggcaatatatactgcttcacgctcaaacgtttctcggcgcaaaggaaggtatgtcgcatccaaatagacacagaaaaacttgtcgcttagcttgcgcttgtgataagcctcaatcttggggagcatctgcttggaaatatttgatacttgagctggactataatgactgccatacattttctcaatcaagtcagcgatttctctggtagttacgcctttggagtatagcttgataatcgtgctttccaaaacatcagagtgctgcttgtagtcaggcagcgtgtgctgatgaaattgaccgttgcgatcccgaggcacttgcacttcaattgggccaaattgcgtatcaactttgcggaaataagcaccatttctagagttgccagtattccagccatttctggcatagggatcatagcccagaaaggcagtcaattcagcttctaacaagttattaacagcctgttgtagctctttgcgcaataaatcatttattttgtctggattgaatagagcttgagcaaaatctttggtaaaatcattcatgaaggagttcttctttctgtatgtgtttttttgttcaaaccaatcatacgagaaaggaactcctttttctaatgtttaaagaaataaatttaaggaatcattcatccttacacaaactattttacagtctctttaaaatacttaataacactatttttagaagtctgtaataaatcaaaagcttgcaacatacattgagttaacctattttgtgcatctggaaattgggctaagtcatcaaattcaattactaattcattattctgatttttcacaccaaaattaatcaaaatcgattgaaagtagtccctacgtttagattttctgtttaaattaatatctaataaccctaactcattaatagtatacccatcatcactaattatatattttgatgtatttccttgtgcaatcactaattctatataatcattgtacatatctaaaaaaggtgtagtgatagtcatataatcctgatttttagaagggacaaattgaatctttttatctatccagtcaaaatatattttcttcattttctctacatcaaacatatttaactgttctcccccctttctttaaaataaactttcctgttctcgaaaattatatgaatttatattatcaacattcaaaaactttaatgtcttcttcaagcattcacacaagttatttaaatcattctgactcaattgaaaattttcattcttttccaaaagtggtacagctacatatgtaccatattttggaaaatccgctctatgcaaatgaggacaaggaatgactttatttgaccatttaaagtctccaacaggattttgatgaggacgtccaataatatctactctaactaatggctgttccttatttctcttttcccttaatagaaaagtacatttaggacgtctatgtccttttctattcaaatcaagtataaaattataattatttccttttaaccttaattgactagaattctgaaatagcggcaaatcaatgtaatcattcttttctattatttgtttaaccgcctcaatcattttagtaatttcagcaatatccatcctttttactcccctataaattagatttattatactatgaaattataataaaactctagttcaatttttcaacaaaataagcatccctgcaaatcaactgcagtgatgcttatttcttattctaaatgttttgcgttatctagcgctgaatcgtgcatcggtcgataatatcgcttgccatcttgactcagtagtggctcggtgaactcgcctttaggcgtatgctgcagggcattcgttactgcataaattgcagcatctaaatcatcaattcggtgcaataattccgcttctagcaatgccggcaatttgggtgaaccatattcaaagcggccatggtgactaagcaccatatgccgcaataagagtaaatcttccgactccagattcatcttcatatcctgagcggccagcataatttgttcatcaattaaaaccagatgcccaaccaaatttccttcagtcgtgtattgagttgcggcagaacctgaaagttccagtacttttcccatatcatgcaaaatacatcccgcataaagtagcgatctattcacttgctcataattatcagccaaacctttggcatccttaagcatcgataaagtatgaaaagctaaacctccgcggaccgcatggtggttgcttttaccagcaggatgatcataaaaacgatcatgccatttttgaagtaaatacttcacaatttttgtccaggtcggattatcaatctgcatcacaaatttattaatttcagcttccatctcattaactggttccggcgctgatttaataaattgatctaattcatagccttcttgtggaccgaccacgcgcagagaatagatcctaatctgagggcgaccctgatattcttctcttttgccattcaactcaacgattgtcccagttgaaaaagttgctgcatcttgattgttagcatcccagtaattaccgcgaatctcgcctgagccatcactgaattgcatcgctaaaaacaacttattctttttattatgacgcaactgtgagtttctaatcaaaacaacaatgtccatttcttctccatcgttgtaatctaacaatctcttaagcatcctgtgttcctttcgtaaaagttaatggctcaatcccaagctgatcaactaaattcttttgagctgtgaaaattaaaacttgattgttttcgctaatcttttgcaataactgatcgatatagctgactcgctgatcatcaaagtttacaaacgaatcatcaatcaagattggcaaattaatttcatccttgatctgctcaataaaagctaacttcaaggcaaagtataattgctcagcagtcccccgtgacaagtattttacttcgcgctttttaccatcacttctgactactgttagcttcttatctaaattaatcccaacatatctgccgcccgttagcaaagctaagtattcctgagccgccttaagcatcttggggaaccgttcattagatgccaagtcaagcgagcgactgatccaccttgccgcaaacaagttagccaagtattctttactgctctggacaaaattggtttctgtattagccagatcctgcttagccttaaacaccgcagtagaatcagctaaattgtctaactgcacttgcaactgagcaacttgactctgaagttcattaatttctgcattcttagtactaatttgttcagtcaaagccgttaatttatctgctaattcggttgaatttgtctgcatttgcagctgttgaagatcatcgcctaacgattccttcaaggccgcaatctgcgtcttcagtttagcctgattaagtgaatcttgataaagctgatcgtaacctgccatattttccacattagcttgggcaaaaagtgcctgtaatttcagacccaattctttcaaatcttgcttgtcctgctttagtgatgcagttaagctggattttctttgaagcaattcttgtttttcactaatttgtgtctcaagttcgtccaaaccgttcaaaacttgactaaagtcattatcaatcggttgcttcaatgcattttggacacttgaggccagttgagccacattctgattcaaaacagttacttgcttattattagtctgtgcggcattctttttgatttgatattggttcagattagttagtaagctatttaagtttagcgtatcaggattcaatccatattttgtttggaaagcttggcgtttttgagcaaccagcttttgcttttctaatactgccgcattttgcttattttggttactattttttaagtatcctgctgctaggaaaattagtccagtaattaatgcaattacaccaactgtacccaacgctaccaaaagaactacacctaatgccgctaacactgcaccgataacataccaaagcttgtcattagtagttacataagcaggctcattgacagcacctggcaaagcttgatagtctgcctgcatttgttcaatttgctctggtgtcaacttgagtagattttttaactcaggtgtcaaagctaatagttgctctttctcctgcttcaattggtcagccttttgcaaacaattacgatattccgcttgccactgcaagagttgaggcttctgctggattagcttcttctctagcgtaaaatcagactgatcgttttcacccaggccctgcaactgcgcttctaccgattgaatcgtcttttgcaaattacgtccctgagccataatatcttgggctttttgataattttgaccattaaagtcgacatccttgacctgtttttgcaaatcaagcagcgtctgataattgcccatttctttttgcaaatcatgcaaatcttgttcttgtttttgtaaaacagccagatcttgtttttgtctgtttaatgccgctcttttttgtacaaaatcttggtgcagctgttcataatcattaaactcatttttagtctgcgctaatttatcacgttgatcagtcatttccttaagcagacggtttacttcgggctttttacctgtctttttaaaaagcttacccgtttctttggcaaaatcgtcgcgcatttccagcaacttgctagaatctgctgctcccaagtaataaattcgctcaagcaaatcctcttgacttaaactgttaacctgacccagcatttcttggttaaaaataaaactatcagcgtaaaaagagccatcaatattttgaatttgatcaaaaaatacactctcaggtacaacttgaccatcttttttgacggttaaaattccctttttagtcttgtcacctttagcatagagtcgctcaagttcgtattcaccatcagctgcagtaaaaactaaattaccgcccatcggactaacatgagctagcggcgtataatcttcaaaaaacggtgaagagttacttctcaaatgaaagccaaataagatctgtttaataaaagctaccgttgtacttttaccagcttcattggcaccaaagaaaacattaatttgatcactaggcaaatcgaaggttttattcgagaactgcccaaagttaataatcttaatttgtttcagtctcatccttaattcctttcaatttactcattagttttacttctgttagattcttaaccgccgcaataaagtctggatcagccgctaatttagcagcttctggatcctttttttgccagtcactaacaatttgcttgaattcagctggtgcaaataactcttctttggcagcttggaaggcttgttggtcattgtcatttaactttaaactagtattcacaacaaagcgcacatcaactaactgagaagcaaatggcagcgattgagaaatagtttgccaaaaatcaagatcctgaactaaatcgcgttcttcggcactcaaatattgagcaccagcaatcgtcaaactaaagtacgttttttgtccagattcaagcttggcaataattttcgcttgtaagtcagctttactgatagctccttcaagattaatttttgtcccttgccataaaattggccctgtttctttaaaatcaatagtagtcttaccactattttcatcaatctcacctagatagcatcccttggctcccatctcattaatgtggcgaccttgaatgttacctggataaacaatccacggcgtactacttaaattatttctcgcatgaatatgacccaaagcaaaatagtcataattcaagttttgcaactcatcaactgtaaacggtgcatacacattctgactagcagtagctgatttctcttgagcatgcattaaaccaaaagtataattttttccttttgctgggaattctgggattttatcctcagtgatatggttattcagatatgaaaagccgattacgtcatagttaaaacccgcatccgtagtaaaagtagcttgctctactgtttcattattgcctaacaatttaaagtaaggactgggactaactagcagatcttcttgcttcatgtggtcatgattaccaaaaatcatcactacctgaattttttggtcagttaatcgcttaatttgcttggcaaaaaatagctgagctcgtggtgatggcgtattactatcaaaagtatcaccagcaattaaaactaaatcgacattttcttgcaaggccagatcaacaattttagttaatgattgatcagctgcttgatagatatggttaaattcctcagatggcaaaaaagatagcccacgaaatggactatctaagtgcgcatccgcaaagtgaataaatttcatcgcgaatattaatttctaagatcttcataaagatcattaattggcttagtgtaagctttttgtacttcaccaagcaaatcgtacaacccctgttcattcgtaagaagtgaaacaattttatcattcttttgaacttgatcatttaagtccttgtaagcttgttgatcttcagctgaaagtggttgaccagcttgttgtgcttgcatgatcttattttgcaattcatccatctttttgaataaagctgaagcatccttatcatcttcaacagctttaattgcttcttgcaacttcttgtattgatcagtttgagtcaaatcttctgctaacttgttagcagcatcgtaaatgttaaccatctagtcctcctaaattttattggccaaataagcctttaaggctattataccattcattgattttctgtcctgcagaaccgagtccatcttgaattttttcacctaatccattagtccagtcatcattagaaccattattcttcacaatctggttaggtgccttctccgtgaattcagtttgcgcggtgtacggcaaaattccttccatctcagccttatataaacgcgtaattcctgtttcagaaatgccctgcatgtagtgttgcttgttagtgtggtcaaaaccaacccaggtagcaagtacaatgtcaggcgtataaccgacgatccactggtccttggtaccaaatccatatgagttaggtacttcagttgacccagtcttcccagctacacggaagccatttggctgagcagagcgtcctgtaccattagtgaaaacgccgagcatcatagtcgtcatttctttagcagtattttcagaaataacgcggtggctgcttggattattattttcggctaaaacgttacccgaagcatcagtaattttggtaataaagaaagaattattaggcaaattacctttgttggcaaaagctgaatatgcacgtgccatctgaattggcgaaacgcctgaagataatccacctaaggcaagcgctaaattacggtcactctttggtaccttaattccaaagttttcaacagattgcacgcctttacttacaccaatcttatccaatagccaaacagctggcacatttttactttgttctaaagcttcatacattggaattgtattagaatagccattgtccacattatgcggttcatagccatttttaccaaatttctgcaacttgttcgatagttgcgagtcatagtgatagccattttgtaaagctggggcatatactgccaacggcttgattgatgaccctggctgccgcttcatctgcgttgcacgattgtaaccccggaagacgtgcttaccgcgaccaccgatgattgcccgaacagcaccagtacttgggtccattgccacgctagcgccttggctttcagttccatcactaccattttgtgggaaaagccagctttgctcaaaagtatcctgcaatttaccctgataattttgatttaaagtagtataaattttaagccccttattcatgacttgttcttcagttaagccatatttagagattgcctcgtcaactacagcatcaaagaagtaaggatagcgatagccgtttttattttgaaaagtattccgcaaagttaatccttgcttttgatacattttagcttgagccgctgtcaacttattattatccaccatcaagtttaagattaaatttcgtcttgctaaagcatttgacatgtgatcaaccggattataaaaactaggatttcgtaaaattccagctaaagttgcggcttcactcggattaagttcacttgcgtttttgccaaaatagcgacgacttgcatcttgcacgccccaaactccgttaccaaagtaagcattattcaagtacatcgttaaaatatcttttttggagtaaacatggttaatttcaattgcaaaaaagagttcttccaattttcttgaaaaagtctgctgctgggtcaaaagcgagttcttggctaactgctgagttaaggtcgaaccaccaccagttacttgaccgtgatgaatcactaaacttaaagtagctcgcgccatgcctttaatactaaaacctgggttcttccaaaaagtccgatcttcagtcgaaattacggcattttgaatattaggcgaaatctggtcatattccacaaatgatcccttttgcgagtataaagaacctgcttttttacccttgtagtcatagattgtagttgtggttgaaagcgaagccttcaaattagctatgtttgatgtcttaactttaattgtataataggtacaagttaagagcatcaatgtgagcaggattaaaataatccagcgtccgataaagaagcgactatcaaatcgatgccaagcatctttaaagccacctcttcttggttggtcgttattcattaaatattgctcctttttagaaacaagaaaattgtaccatactatcaaaacacgtgtttataactagattagacttaagaaattattatgagtttccgttttacacttttttacccagaaaatcttgctccggcatctgtcaatgaagtactacgtcaacttttaatccctcgcaagtggcgtcattttttgcgaattgaacaaaatattttagttaacggcaactatcgctattttaatcaaaacattttacctggtgataaaattgaaattaacttggatcatgttgaaagtgatcaacaggcttatgcaccaagcggtaagatgcccgatgttatctatgaagatgataatcttttaattattaataagaaaaaagggcaaaaaacgcaccctaatctaaatgaaactaatactgctctgaacgattgtactacttatcttggtcagagtccctatattgttcatcgattagatatgttaactggtggtttacttttaattgctaaaaatcctgcagttgtacctattttaaatcgtgaattaaccagcaaaatttttcatcgcgattatttagctaaagttatcaatgctgatcacttagctgaaagaggtacgattaatgccccaattggtcacgatccacttgatcaacgcaaacgcaaaatcgatcctactggattaagagcagttactcattatcaagttttacaaaaaaatgatgacaatactgcgattgtcaaattgacgcttgaaactggtcgtacacaccagattcgcgttcaccttgcctctttaggaagtcctattgtaggcgatcctttatataaccctgattttgccagtgagagattagccttagatgcttacgaaatttcattagttcaaccttactcttttactaaattaaatgtaaaattgcccaaaaacaaaattgaactctaaaaaagcctttgactgcaatactgcaatcaaagacttttcatcaaattataaattttaccacgcgtggtgctagttaaatcgttctagacaataagccaaattataagctaaaattgcaatttccaaccggctttgaaagcctatcagactacgtgctcgattgttctcggcattgtaataggtcagaagcgaaaagtcgctttcaattgttctgcgaatagccatcaattgatgatcattgtgctttttagctcctgtcatatttttacgatatggtgtccaaagttcgtaacccatttgttttagctgttgatgcagttctttgcctaaatagccttcgtcgccaagaagatagtaattagatggatgggtattttctatcagttcaactgtctccctggcatcatgaactgatgcctttgttacgacataatcaagaatgtaaccgtcatcgctaacaatggcatgaactttgaaaccatagaagtaaattttcttggtggccttataaccaatgttggcataaccgcgaaaaattttagcacgatagtttcgaattggttggcaaacaggtaccggaaagctgtcaatgatcaagaactgtccattcaggtcaacctttttattcatttcttgccgtatctgataaatcaattgcaatagctgacgtgaacgccgattaaaacgtgagtgtgataaacaattgaaacattcacagaatcttctttgtgattcaattcctgtcttagcttgccagataagtaaagccaaaatcagactgtccgtagttttaatttgatcaatatttcgccgatgagtaaactcagccggtgcatacaaacgataccagtgccgacaaattatcactaaatctttaaaactaacttgtaaatggtggctaaaacgcttaagcttaaggcagttcaatcagatcagactcttttctattattactatttacaagtcgagtctaacaagattggacttttttattaactaaaacgatttaactagcaccacgcgtattttaccaattatattcatttggatcctttttacctaagccagttgtatgatcaaggaggatcctctgctcataatgagctacatttagcttagtcgccttcaccatgtcagggttaactgatacaaaatcaatgccacttctgactagaaattcagtaaattctggatattctgatggtgcttgaccacaaatcgaaaccgtcttaccatcttgatgagcaacctttatcaagtgcctaatcgcccttttgacggcaagatttctttcatcaaaaagatcagcaatcacatcattattccgatcgcaccccagtaaaagcatcgttaggtcatttgaaccaattgaataaccatcaataaattgattgaactggtccgccaaaataatattagctggaatttcagccatcatgtaaaccttgaagtctgcgcttctaactaaaccttgtgtccgcatgatttccgtcactttgcgcgcttcatccactgttcggcaaaatggaatcatcacatgtaaattctttaatccgaactcatcgcgcaccttttttaccgcttcaagttccaatttaaaagcattaatatattttggatcataatatctagaagcaccgcgccagcctaataggtctgctggttcatgcggctcatatttgtcgccgccctttaagttgcgatattcgccagacttaaagtctgaaaaacgtaaaactactggccgtggtgccattgcccgcgcgactttaccgattccattagctagctcgttaactaccctctctggatgaccagtttcaatcaaataaaggggatgctggtgaatataagtcgtccataaaaattcttcgcgcattaaaccaatcccatcagctggcaaagatgcatatttttcagcaagatcaggatctcctaagttcatcatgactctggttgcagttggtgggaaatattcaactgcagcaggctcagctggcttttcatcgacttttttaaccgcgtctttaacaactccagcataaaccacaccatttttagcatcgacggtgacagtctcgccgtttttcaaagttttcgtagcagcttgtccacggctagttgttccaactaaacaaggtatctgcatttcacgtgatacaattgcagcatgacaggtcattccaccattattggtaataattgcggccgcctttttcattgctggcacccaatcaggcgacgtcattagagtgaccaaaacctcgccctgcttaaattcattgatatcttttggatcatcaataatatgtaccttgcctgagacaaaaccaggtgaagctggcaagccttttaacaatactcggtgttctgtagttgcttcttgtggtgcatcggttttctcctgctttttcttttgtgaccaaacagtttctgggcgtgcttgaactaaccacaacttatcattttgatcaagtgaccactccatatccatgtagcagccataatgtttttcaatttctttagcataaccagctaattcaatgatttgcgcatcagtcaaagcaggcttattcacttgatctggtgctaccttttgttcaattgttcctcccgatggcaatctgatcaactcaattggctttttagtcaccattttgtgtacaatcttcatcgtatttttatcaactacatagttatcgggtgtaacagttccagacaccacgtattcgcctagtccccaagaggcctcaatcataaccttagtgtcatcaccagttgctacattgaccgtaaacatcacaccagctgctttagaaaaggccatcatttgaatcgcagctgataaagcaactttttcttgtggaaagttttgtttaattcggtaataagttgcccggtcggtgaaaagagaagcgtaacattcttgcacctttttcaaaacattctcacgaccatgaatatttaaataagtatcttgttcgccagcaaaactagcatcaggcaggtcttcggcagttgcactagaacgtacagcaacgaatggctcattttggtgcatcttttgggctaagctatcgtaagcacagctaatttctaaggctaaatcatttggcatcggcgcttctataattaattttctaattttggtgcaaattcgatgcaattgctcagaatcttctggatcagttaaagtggccaataatttatcaattttttgatttaaatcagaataattcataaagtggcgataagctatggcagtagtcgcaaaaccatacggaaccgggacattcgtttcagaagtcaactcacctaatgaggatgacttaccaccgactaaatcaacatcatcgcgatgcaattgatcaaaccacaaaatataattatctctattcatgcttgttctcttttcgttaacgcacaactaacatttcatttttagctgctttatttaaaaccacgaaactgtcaaatcttttgtgtaaatagttctttctcgtaaattgattttttaattatttacgcgtggtgctagttaaatctttctagacaataagccaaattataagctaaaattgcaatttccaaccggctttgaaagcctatcagactacgtgctcgattgttctcggcattgtaataggtcagaagcgaaaagtcgctttcaattgttctgcgaatagccatcaattgatgatcattgtgctttttagctcctgtcatatttttacgatatggtgtccaaagttcataacccatttgttttagctgttgatgcagttctttgcctaaatagccttcgtcgccaagaagatagtaattagatggatgggcattttccagcagttcaactgtctccttggcatcatgaactgatgcttttgttacgacataatcaagaatgtaaccgtcatcgctaacaatggcatgaactttgaaaccatagaagtaaattttcttggtggccttataaccaatgttggcataaccgcgaaaaattttagcacgatagttgcgaattggttggcaaacaggtaccggaaagctgtcaatgatcaagaaatgtccattcaggtcaacctttttattcatttcttgccgtatctgataaatcaattgcaatagctgacgtgaacgtcgattaaaacgtgagtgtgataaacaattgaaacattcacagaatcttctttgtgattcaattcctgtcttagcttgccagataagtaaagccaaaatcagactgtccgtagttttaatttgatcaatatttcgccgatgagtaaactcagccggtgcatacaaacgataccagtgccgacaaattatcactaaatctttaaaactaacttgtaaatggtggctaaaacgcttaagcttaaggcagttcaatcagatcaggctcttttctattattatacaagttgagtctaacaagattggacttttttattaactaaaacgatttaactagcaccacgcgtaattatttatttaatcaaagtaggattctaaggtgtcctgaacctgaccaaagcctttatgaattcgattgaaataacggtcattgtagctcattgcctgaataccaataaaagcatcaagcgactgttcagttggaaactctgccttaggcttagctttgcgcttgatcacattgttaaatgattcaatcatgttagtcgaataaattgaagctctgatctgcttgggatagttataaaagaccagcagatctggttctatgtctttcaagcttctgataacatggctgtaaaccttgccccatttggtatagaagtcatgcaggacagctgtggcttcttctttgtttgtctgttgatgcacctgtttgaattcgttcatgatcttttcacgatcgtcgacgcgtactttagcgcagatattgcgcatgacatgaaccaaacagcgttgaaaatgagctttaggataagtcctggccaaggctgttttcatgccaacaacaccatcagaaagaaagagttcaacttgcttcaagcctctggacttcatgttttgaagcatctctgtccagacttcaatgttctcactaggagcaatgcagtagtcaatgacttccttatgtccattaggtttaatgccaatggcaatatagactgcttcacgctcaaacgtttctcggcgcaaaggaaggtatgtcgcatccaaatagacgcagaaaaacttgtcgcttagcttgcgtttgtggtaagcctcaacctttggaatcatctgcttggaaatatttgatacctgagctggactgtaatggctgccatacatcttttcaattagatcggctatttccctggtggtcacgcccttggagtaaagcttgataatcatgctttccaagatatccgagtgctgcttgtagtcaggcagcgtgtgctgatgaaattgaccgttgcgatcccgaggcacttgcacttcaattgggccaaattgcgtatcaactttgcggaaataagcaccatttctagagttgccagtattccagccatttctggcatagggatcatagcccagaaaggcagtcaattcagcttctagcaagttattaacagcctgttgtagttctttgcgcaataaatcatttattttgtctggattgaatagagcttgagcaaaatctttggtaaaatcattcatgaaggagttcttctttctgtatgtgttttttttgttcaaaccaatcatacgagaaaggaactcctttttctaatgtttaaagaaataaatttaaggaatcattcatccttacacaaactattttacagtctcaaaacccatctttagcgggtgctacataacttaaatatttcaagttattatcaacagcagacatttttactatcccgcaattatcatattctttaaaagttggatttactcgctgcgtaaataaccttaaagccgtcccatgtccaacaatcaaaattgtatcgttggcatgggttgaatcaatgattttagtgatcgctcgttccattctttcttcaacatgttgatccggctccattgcggcattaatacggctaaagccacgtcgccatggcaacatgaattcatcttgtccttcatattcaccatgagatttttcatgcaggtcacgcagtcgcgtataagacaattgattatcagttataatttctaaagtatcgcttgccctttcctgctttgagcaaaatgcggcatcaaaactaatttctttttgcaaaaaatacttccgcaccgctgtcgcctgcgctttccctaattccgtcagaggagaatcacaagtaccttgtattttatgatgcacattgaacaaagtttgcccatgtcgcaccaaatatattgttctcattaactgctactctctttccttttatgcatattaattgtgaacaactgtatagtaccacaatattttgaaagcgcttaaagttatatattaagtatatataaagctatataccaaatttgtgaaattaatataatgattatgcatttatttgtcaaaagtagatttggcattatctagggcttgttaaataatgttcatatttggaacggtctaatttattgagttgctggataattataaaattgtgatgattgcagccaaatagtaaatctttttaattaatttaaaagttagtgttttttaatgctattttcttgcttttttacaaaaaactatatctatttttcgagttaagagtataatttttggttgtactatttttcacttattttttctactaaaggagaagaaagtatctattatggaacatacttggttaatgaagtattttgccgaatttttcggtacgattattttagttgttttaggtaacggatcagttgccaattctgtactacgtgataccggtggtaatagccgtgacggtcaagccaatggtgggtggctcttgatcgccttcggttttgggtttggagtaatgctcccagccatgctcttgggttcaatttcagggaaccacttaaaccctgctgttaccttagctcaggcttgttcaggcgtcttcccatgggatcaagtaatgccttacatcttggtacaaatgcttggtgccatcgtgggacaactaatcttagtagccgtctactggccttacattggcagaaccactagtgatgatgctgtttttgccagttttgcgactggtgattcggctaacagtaagttcaacggttttattaccgaattctttggcactgctattttgcttttcatcgcagttggtttatatcgtggcatgttcttcaagcaatctgaagacattgctaacatcggggttggtttcttaattactgctttagttatggcagttggtgggccaactggaccagctttgaatccagctagagatctaggtccaagaattgtttatgctttatgtcctttgccacacaaaggttcagcccactgggattacagttgggtaccagtggttgcaccaattgcaggtggaatctgtggtgcattattatacaaaattgcatttggattataagagatctaatcaaatagtaaaaaaagcattaagctatctgcaatagcttaatgctttttcaatactcggtatctaaacctaaatagaaaattgaatctacatttttagtttcattatccgaattatcttttaaaaaaatttgtggtatatctccaaaagtcggattaaaaggatttttcattttaaatctctttaaatctaaaatagagtagagggagttttataactcgcccctctcattgcaccggacgtacggttccgtatccggcgctacgtttgtgattatttacgagataaataatattctagcggatcgaccaagcctgggcgatccgctttgcttatgcccaatacttttgggctaagcagaaagttaatgacatgacccgtacttcttttataccaacctaagcgcgtattagctactttatgaatatcttcatcactaaaattgcactttagtgccttgttaatccgcattaagttaatgtatattcgttttggtagtttccattgtttaatgattaccacccgtactttatgacgcagccattgactgaacttaattagaaaatatttcatgtcgccaactctaaagtaattgacccagcctctaactacttgatttatcttagtaaagactagtgatagaggctgagcagctgcttttctgcgacagagaagttctctcatcttgtcataaagcttgattttgcggtcatctcctggctttgcttgccagtattcgccacttttccagaaggtaaagccaagaaagttgctcttggttggtcgtacaactttggttttggttgcgttgacctttaggaatagctttctttctagccatgatgaaattgaattcatcacacgtttggctgatttaccgcttttgacaaagatattgcagtcatcggcatagcggacaaagcgcaggcctctttgttccaattctttatccattttatctaaatagatattggatagaattggtgaaagagggccgccttgtggtacacctagtttattaggcttaacccaaccatcttccattactccagctttaagaaaggctcgaattaaatggagggtggttttgtcatttacttgctctctaattattgaaattaatttatcatgatttaccgtgtcaaagtatttctcaatatccaggtcaacaacccattgatagccttcgtttaaatattccaagacttgttcaatagcgtcatgagcactgcgtccaggtctaaagccatagctatgctcactaaaatgaggatcatagatcttcattaatacttgggcaatagcctgctggattactcggtcaacaaccgtgggtattcctaaaggacgtttcttaccattagctttaggaatgtagactctgcgaacagcttgcggacgatacttcatcttcatgatggcgtcctttatttctacttgatgctttttaaaatagctatcaagctcatcaactgttctcctgtctacaccaggcgctcccttattgattttgactctcctgattgcttccttgagattattttgacttaaaatctgttcaattagttccatctcgtgatatctccatttctacttgtaaatttattcagaattgtcccaattgctttcaccatcaaagagttacgttctctttgtgctaggctatcctcttatccggactgtctgaacattgcttatagcgagatatgctcttacaaacattaggcccttcgctccagtttcattacaaaaccttcagcactactacgacctcagctgacttctcgcgattaacctttttcgaccaggcttacgatcgctgatattaaagcttactcggtttcacctgtccacgagatctctcggggtaagacattcatctttaattttccactgccccctggtttaccgtcttggttttacggttgtcctttggactttaacttgtgctgcagtctcatccaccatttggcctgaccaggtttctgtacgtaggctcggaaaactcgctagccacttccttcacccatagcgtcaccgctaacggcttgtggttcgctacacttggcgacaactacccgtgatctagactttcactagactaaacaaatgccatgcccgacacacagcaaaaaaactgtctagttcttaactagacaatttttgcgttaaataatcccacgctgcaacgccataaaaattgtaataatcaataaatctgcactgccaccaaggctataatttttctctttaaaaatctgatttagttctaacataaactgtttaccagcttgagtaccgtagccacctaatgccaaatatttttttgcttgattatgtgcccaagaaacaacctcaatatttcccgctctttttattaaattcgagtcttcaatcgcactaactattttcatcaacgtatcgagtaaacgaacattcaaatcaccttcggtttgagctaaaaatggcagtgctacatccctcaccaaaggataaccagcttctgcttctgctctaactccacctttaccatattgcaaaaattgtttttctccagcagtctcattcctcttgcctaaatcgtgctttactaagcccttagtcatctgctggatcacttcaaattcaccttgattattattttcacaatagctacttgcacagccaaacaaccctaacgaaaaaatcgcgcctttatgggtatttatattatgcgttgtcttaaacattgctttttctgcctcaatgccagcttgacgcaattgttcaaacatttgccgcaaatcctgccccgtaaaatctgctccaattttagctgcttgccgaaaataattttctaaactcaaactgctattaataaacaaatacacattcatatcaggatgagaccccacgtcaactggatccactaaacctggcttaggattggtaactacttcataaagcaatgcttttagtgcgttttgtgtgatcttttctactgacattttgaccccatttccaaaatagctaaactaattttaacatgattatcctttcgcctaatttaaaaaaatgacacaataatattaggaaaagaagagagcaagttcatgaaaacagatcaatttaaaagctatcaaatagctgatattggcgattatttaaaagtattcgcctgcagcgcagtaatctcacagccaattatgtcgctggtcatggacgtagaacaaccggttcacacacaagatgtttttggcgttttttataatttagtcaaatatacggctccagcttttatttttggtattttgtataccacaatccgtactaataatgaaaaaaatagtttttcttatgcaaaacatatgcagacaaattggtctaatctttttgtacctactatttggtggacgttaatctacctagtagggatgccatggctgcaacaagttaaccattttaacaatcttggttcattctgctggcaattcattaatgggaacgccgccccgcacttgtggtataacacgatgatgttgcaattcatcattttaatgccgcttttctggggattaagccgctatgtaggacacaatctaactcgaggtatttggattgcagtaatcactttcgtactctattttgtctggctttggttctatgattacaatgtcttccatggcatgcacgaacatgactggtatttactcgaccgcatttttatttcattcttcatctatggtgtgtatggtgtcttagcatggcgattgcgtggttattacaaccagctggtcactaagttttggtgggtaattaccatattatttattgcttgcttcatttggactaatgttgagttgcacaagttcggttatccaatcaacttcaataatgcaccatattacaagccgtcaatgactctttattgtttagcagtaattgcactgatttcagctttttgcctgcatcaagttagaaaaaattcgcaaaccagtttaaaagtattccatttcttggctacttatgcttatcgcgcatatttatccaatgtcttctggaatcaattagtttggcgcggtcttaacatgcaatatcacgccatttaccacccattcttaactttctttggaatcttgctgttaacctggatcttgtcattcacttcggcttattgcttacacgtttggtggacgaaagcgaagagtttaattagcagcttttttcgttaattatcaatttcatataattcttctgcttctaacaaaaagtctttcatgaatggcagagaaaatgccactttgccatatcctgcatcaatgattacctgactatccattaatcgctgccgatattgcgaaatataattagaactttttcccatttgcttgcgaatatcacttatattaacaacatttttatcattatgagccatgatgaataaaaattttcgatcgactggcgataattcagagataatcttgatataagcattacgaaacagatcatttttaaacgatgagatcgaattttcaatactttcatctgttacctgatcagtagaatgttgccaaacatgatatcccaagtcttgaaatgcataagcgtaacctctagtcagcttagtcattttcattaaggcagtattattaatctctttattacctctttcaaatgctttttgataccgatacttaatatcgaaaagatcaagtggtcctaatggtacacgaccgcttcttaaaagaaatgttaatacatcattattttggagttcagaaacattcttaggcagcccagtcatcatcatattaattgaatacttttttaacaccataatttgatagatagacgccaaattaacaatctcaggagtttctttaacctcatctattgctatcaataaagattggtgatgcttttttaaaacttttaacatttcttcaagtaacacttgataagtagattgaggatttgatatatgaacttccaattcaaagccaaaagccgaaaactttacaccatcaattttgttcaacgccttttttactggattcgctgcttcttgataaatactttggatgagcgtggcaagcaaatcatttgtcatggctaagtaaataacaatccagttatctttttgttctaaagttgaggtaatatcagcaagtaatgaagttttaccaaccccgcgcatcccatagatcattgaagtttgatagggtccggtgccactttcaagtgatcttactatatcttctactattttttgtcgccccaaatatattttgggaactttgccaaagttagggtcaaatggattcgttatttcagacataattgatgttcacctattttcattattttagttgttggctttaattttatatctctttagatcttatgtccatttttatatctctttagatcttatagttataaaaaatgctcaaaaaattttgagcattaccattttatgagttatcgaaaaactatctcattaataaaaatttatatagtggcattaactgaattatcttatcttcttgctgaatttcagcctcttcaccatgagtaacgattattaagttttcaacttcatcaaaattatcagctaatttaattaggttcccaacttcacgttcttttgacgtatcatttacttcccatgcaacttgaattgcaattttactagctggtacataaaaatcaatatctatccctgtcttttgagattttaaataaaataaattctcttgatatttattatgcaacttgatcgcaactagattttctagtaatgctggcaatttatccagataaaacaaatttaaaatgccattatctgtaaaataatactttgggctgctttcacgctcactaaatttagcaaaataatttttggtggaaaataacaaatatgcatccttagcgtaatcgatataatcaataatcgaattgcgacttaccgtactaatcacattttttatatttttatacaaagttgcatatgaaacttgagactgtaaaatagtttgtgtaaggatgaatgattccttaaatttatttctttaaacattagaaaaaggagttcctttctcgtatgattggtttgaacaaaaaaaacacatacagaaagaagaactccttcatgaatgattttaccaaagattttgctcaagctctattcaatccagacaaaataaatgatttattgcgcaaagaactacaacaggctgttaataacttgctagaagctgaattgactgcctttctgggctatgatccctatgccagaaatggctggaatactggcaactctagaaatggtgcttatttccgcaaagttgatacgcaatttggcccaattgaagtgcaagtgcctcgggatcgcaacggtcaatttcatcagcacacgctgcctgactacaagcagcactcggatatcttggaaagcatgattatcaagctttactccaagggcgtgaccaccagggaaatagccgatctaattgaaaagatgtatggcagccattacagtccagctcaggtatcaaatatttccaagcagatgattccaaaggttgaggcttaccacaaacgcaagctaagcgacaagtttttctgcgtctatttggatgcgacataccttcctttgcgccgagaaacgtttgagcgtgaagcagtctatattgccattggcattaaacctaatggacataaggaagtcattgactactgcattgctcctagtgagaacattgaagtctggacagagatgcttcaaaacatgaagtccagaggcttgaagcaagttgaactctttctttctgatggtgttgttggcatgaaaacagccttggccaggacttatcctaaagctcattttcaacgctgtttggttcatgtcatgcgcaatatctgcgctaaagtacgcgtcgacgatcgtgaaaagatcatgaacgaattcaaacaggtgcatcaacagacaaacaaagaagaagccacagctgtcctgcatgacttctataccaaatggggcaaggtttacagccatgttatcagaagcttgaaagacatagaaccagatctgctggtcttttataactatcccaagcagatcagagcttcaatttattcgactaacatgattgaatcatttaacaatgtgatcaagcgcaaagctaagcctaaggcagagtttccaactgaacagtcgcttgatgcttttattggtattcaggcaatgagctacaatgaccgttatttcaatcgaattcataaaggctttggtcaggttcaggacaccttagaatcctactttgattaaataaataattaaaaaatcaatttacgagaaagaactatttacacaaaagatttgacagtttctgaaacttggtgcattactgtatcggcaatttttctaagtaataatgaaatcgtcttttcattacgaatcttattgcggacaatgatatcagctaaaaatacattttgataaatacttgttaagtaatttctcttgtctgttaagataatagattctggcaacccaccataacatagatattcatttgcggcagcacgaatttggccattattaactgtatccaagacggataatttatcatgtggaatttttttagcagttaaatattctgtaaaactaaaaggtgccacatatttggtcatatatcttccacccagccgcagaacaatatcatgacccaacaccttagagttactaccggttaaataaacactttcaccttgatctgctaaacgacgagcaaatttttcccagccagcaatattttgaatttcatcaaataaaaaataatgcttcttagttgttaattgattggctgcaattaagatattattacaatcagccaactgaaaaccatctaatcgttcatcttcaaaatttaagtaaacaatttgtgaccaatccacattttgtttattcactaaatcctgcgcccttttaaataatagcgttgatttgccagcccgccgcaaacctactaacacataatttaaactattttcaaaatgataatcacgaggaataatagcaatatttttaatattattctgaccttcaagaataagtgccgcaagtaaatctggattcatgttttgctcctatgtaatttatattaatcaaaataattataattttgtttaatatattaagcaaatattgcgtatttagagttagtatatttttaaattaaaaaagtccagctttcgctgaacttcccttcatttcttcttcggcacaaaggcaagagccaagagcaaattaataattatcaaaatcagtaataccataaatgtccacttagaaccgactgctgtgccattagtcagatatttattctgcgctagcgcaatcaaggtctcagctaaagctgttcctaaagcacctgaaaattgctgcaaagtattaaaaatcgcattaccttgtgcatgattttctttgcctaaagtgatcaaaccgctggtcatcaaactgccaaagcacatcccgtatccgccataataaagaacgtataacaagacaattgccaggttgcttaatggggctaaaacattcatcaaaatcaaactagcgattatccccataataatcggcagccgcgcaccctttttatcaaacagctttcccgctacagccgccattagcgcgttaattaccgcaccagggaaagtaacccagcctgctaatgaaacagaaccatgattgacagcctgaacatagattggaaagatgaagcccaaagctagcgttgcaattttggcaaaacaataagctattagctgcatactaaagcgtaaatttttaaacagtttcggactaatcaaagccgccttatcagaccaagatatttttagccaaattaataaactaataattcctagaattaagaagcccaaaacttgaattgagaaaaatgaatgtttagcaatccgtgtaaagcccagcattaaacagaccagcccaatagccaaagatagccattgcacatacttgaacttcactttttcaagcggattaatctgccgaattgaatagcttcccgtaaatagactcaagataagtcaactaccccagaataaattctggggcttggtggctggctcgttagcttgcgctaaccagaacaccaacttgcttagatacggacttgacttaccaacaataatcttttgactattgccgatagaggtcgtctaattaccaaagccttttgagtccgcgagttgcgagcggactgcagcctagcttaggctgctttttttattttagaattctgccagttgcctaagcctttttctaagatgtttactgccgcattccaatcacggatatgatgcgtttgacagattggacaagtccattctcgatccttaagcgttaatttcttataaccgttttgtcccataatactgccacattgatggcatctttgggtggtgtacttaggatcaattgttttgaactctttgccatataggtctgccttatatgccagcatgttcagaaaactgcgccagccaacatcagaaatagcttgagacaaggcatgattctttaacaggttcttgcttcttaattcctcggcaactactaaatcgtggtttttgattagtgcagttgagagtacttgcaagaagtcatttcgctgtctgcgaatcttatcgtgcagtttagcgactgctagacgctgtttttgataattcttggctaagcgcaaattgcgtccctctttcttagctctgcgctgcctgcgagacaagacacgttgggcatgggcaagcttctttttggttttgcgataaaatcgtggattagccaccattgctccgttagatgctgttaagaaattatcaagattgaggtcgatgccaatttgactctgcgtcttaggcaattccttaacaaaggcaatatcgctgcctagttgcattgataagtaaaactggtcgtcagcggtctttttaatcgtgactgtgccaattctagttgggatatgattaagcaaacgctctttaatcaattttctaaagctggcaatgcggacaacgcctagcttaggcaatttaacgtgcttagcatcaataaatctagctgtcccgttatcaagaaaggcttctgtctgtttaggatactgacagttggtctgatatgaccaatcactacgttttttgtgaaaagtcggaattccatgaccaagcttgcgatagttgttccaagctttctgatagttttgaatcgcattggcaatagcgagactgtcaatttctttaacgcgtaaaaagctataggcatcgcgaatgttctttggcttagccaataactcattattggcgactacttcttctgctagcttagtctcataattattaagaacagaaaaggcaaaaggcattacttgatattgtctaacagctaagtagcccttagcccgataattgttccgattacgtcctacataagagttgtagacaaaacgctgagcatcataatttagcttgatgattttcttttgtttagaactaggataaaagcgtactttcaagccaaaatggtaggctaaactgctcattctcttcatgtgtttcacctccttctgtagattagatatttatattttacaggaaagtcgaacatatgtcttcattttttaataaaaaaagctgaccattaggtcagcttggccctatccatccccgcattaaaatacggggaatttccgggcgtttttcattaaaaatagcgaaataatgaagatccagcgccaattaagtgcatcggtaatcattccgccaaaaactggccctaaggcaacgacacaggcagtaatcatagtgccgattcccatcataaagcctagtttttctttaggtacttcagccaagataatattgtacattaacggtaagccaatccccgtgccgactccttgcattgcccgtcctaataacaataaatcaaagcgcggtgataaaatatcgatgattagccccaaagtaaacaaaagaactcctagaataaaaattttcttagtcgaaattcttaatctaatctgtgagctaattggcacaatggtcgcaattaccaataagactagtgtgtttacccattgaacttgatcagtagtaatcgaaaattctttaattaacgttggaaaagtaactgtcgtggccgtttcatccaatattcctaaaaatgagagcatccctgccgacaaaatcgctaataccaagcgtggcgtaacttttttagccattttccatcttcttttctaaataacttcagtgcttttgatataagttcattatactgtttgtcgactgccgttcacaaaaaaataaagctcaagcaattctgctgagctttactacttaatatcttaattttataagccaaacaataacaagttctttccttctacattcatggagccatccttcttaagttgattcaatgaacgtaaaacaaaatctctttgactgccacgtaacttcttagcagctttcattgcagcgttaaagtcacgtttgttgtttgccttcttcagactggtatttaatctattagcaattcgcttgagtggcttaatcacaccttgcatagacttgctgtttaggtagtagtattgcaagaaagcttgagtaatccaagttgaatactttttatcctttgaagcgactacaactaaatattaccaatttgccgattatcttactgaattataaaaactaataagactatttaagctaagcgtgttatattgatattcacgttaacgttcaattttctaaaattttcaggttacttactatttattaatctatagagttccaaaatacctaaaactagactaaatcctcccaaaataaggtagtcatatatcgattcagaacgttctatctgtactattaatcttgcagcagaccaacccgtaaaaaatataaatataaacgctaatatgcctctagcaactctactagttaaaattcctctcataatacttttttatactcccatttaacagattgtagatgttttctatgagagtcagtataagtataggtcttccaagcataatattcataccctctagtgcaatattcttttatcgtataccatttatttttaggattctttccaaaaatatcattataaacagtataggcaaaaccgccggcagaaacataggggccaactacaggaacaaatccaagcaaaccaataataatatccttagtagttcctttcagtcttcttaccgtatctgcactatatttctctgtcgtcaaataataatactttctacctgcatgtttaaatgctaccttaccatttgcgtacgtaaaattaataaatggatcaaaaccacctacacttgtcgtaggtaactggctattatttatatcaactgaatatacttcctcattattcaaataaatagtatatacaccattatttgaaacaatgcgatatgaatatatttgaccgttatatttaatctttccagctaattttgaagaattatctggaagaatttgcatttcagttccatctgttagcttaacactctgccaagtgtatctactactttcttgactattctggctacttttagccgaatctagcatagaagcattaacagtattaggaactatcccttcccctgctgctaataacattgtagctgctatcaaagatacaatgcctttagatatacttctcacaatttcttccccctcaacattaaataaattcttctaacttcagttttatattaattttaaatctgtgctagaaatatcactaaaagctgaacaacaaaatattatcttcagccttatcaatattgccaacttttttcacttgattcaaagattctaagacaacttttctttgattagcaggtaatcttttagcagctaatacagcttgattaaaatcttgcttattccgaatcttctttaggcttgaagagtttctagttgtcaatttagacaatggcttaattacttgttgcatctttttagtattccaaaaatagtatttaatagaataacgcgttgtccagcaactatattttttatctttagagacaagcagatactgtggtgctccaccaaattttataacctttgtcgcataagcaactttttcaattctaaatctaacgtttttaattttcttccaactaactgattttgcgttagatattggcttagtagtagttaattgtttcttgtaattcttttgccctacataaatcttccctgatggggcttgaatagttaacacataaccttgttttgttaggttaggcttattaacaatatttgcgacgggttttccactctcagtagtattggtatcagctacagcttgaacccgtttaggtgcagtcattaatacaccagtggtactagctactaataatacactagttactaatttttgaaatttcaatttttccactttccttttatttattaataccagttgtgagcctgccaaaatcttttagccgccgaccatgaaccataacgtcccttaacatatcgtaaggctgttttttcttgatttgctttgctataatttccgtttaaataagtatttgttaattgaaaacgcccaatatagataccatttcttgcattgtaatttccaccagattcacgtgcaataatccacatcttagcagctctctcttttgctgaaagactatcataatattttctctttaatgagcttggaactgaagtatctgatctaagatatataccaaatagtcctgacaaatcttcattttgtggaagatataatggcgtgccattagcaatggttttatctggatcaatattatcattcaacttttccaatacacttaatgaagtgttgtttgcttctgcaacttgacgaagagtttgattatcacggctagctactggcgtaatcaaattcttatctggaactgcagtatttgcatttacctttaaagtatttgtagttgcttgttgtgaactatcggttgtatcagcttgaacagccttagtaccaactgtgaatagcatccctgcaacaactgcagatgacaataataagtttttcttgttgaaaattttcattttcgttctcctcattaaatcaatgaatatcttgaaattcataagttacttactacctattcataatttacataaactatagtaatgcaatcctggagactgtcaagaagtttgtgtaaataatctctctcgttgattgacttttttatttatcttttaatcaaaataggattctagggtgtctcgaacttgcccaaatcctttatgaatcctgttaaagtaacggtcattgtaatccattgcctgaactccaataaaggtgtcaagcgactgctcagttggaaattctgttttaggcttggttttccgcttaagcctgttgttaaaggattcaatcatgttagttgagtaaattgaagctctaatagctggcggatagttgtaaaaggttaacagatcaggctcaacctgtctaagatctctaactacgtttttgtaggctttttcccagttttgatagaattcatgcagcacctgtacagccatttctttgtttgactgagtatgaatctgcttgaattcatccagtgcttttttcgatcgtcaacccgcattttggcactgatattacgcatgacgtgtaccaagcagcgttgaaaatgcgctttaggataggactggcagatagcctctttcatgccaactactccgtcagacaagaagagctctacctgttcaaggccgcgactcttgaagcctttgagcatttcgctccaaatctcaatattttcagtaggcgcaatacagtagtcaatcacttctttatgaccattaggtttgataccgatggcgatataaactgcttcgcgctcatgagtgacccgcttaagaggaatataggtggcatcgagataaacgcagaagaacttatctgacagatgtcgctgatgatatgcctcaactttgggaatcatttctttagaaatattggaaaccatagctggagaataatagccgccatacattttctcaatcaaatcagcgatttctcgggttgtgacgcccttggaatagagcttgataacagtttgctctaaaacatcagtatgccttttataatctggcatagtgtgttgatgaaactcaccgtttctgtctctaggaactttgatttctatttgtccgaattgcgtatcaaccttgcggtaataagcaccatttctagaatttccggtattccagccatcgcgctcataaggattgtagcctaaaaaggcagtcaattcggattcaagcaggtcattgacagcctgttggagcttttgtctaaataaatcattaattttatcctgattgaatagagcattagccatatctttggtaaaatcattcatgaaggaatctcttttctagtatgtttttcgttcaaatcaatcatacgggaaaaggattcctttttctaatattcaggaaaataaaattaaggaaatattcatccttacacaaactattttacagtttcgcatttgacatcatatttgcaataaaaagacagagtagtattacctgctactctgtttaattaatcaattatttttcagtatttgtcaattttatgcacataaaaaattcctaatgtactgtattccaagaaactggaactgaagtcaatcccgtggctacgcttccagtacttccatgtaagaattcagttactggcttgggtgccttgaaatgatgtgtttgaatatattgcgtaatttgataactgagtcgaccataaattgtttgaacagattcacccttctcggctttatcaattgcttcgtcaaacatgttaattaattctgcgtcatgctcaacttcgggcgtaaaacgtacttcctcaagtgcattttttaaagtcataatatctggtgaaaattctgaattcttatccttctttttgccaaacataattattttcccccctcattatcaatgagtgtaatcctctatctatgatattcaaagccataattttcctctaaactaaaaccaaaactgtataaatagctatatatgtaatgaaaaatattgataaatacgcgtggtgctagttaaatcgttttagttaataaaaaagtccaatcttgttagactcaacttgtataataatagaaaagagcctgatctgattgaactgccttaagcttaagcgttttagccaccatttacaagttagttttaaagatttagtgataatttgtcggcactggtatcgtttgtatgcaccggctgagtttactcatcggcgaaatattgatcaaattaaaactacggacagtctgattttggctttacttatctggcaagctaagacaggaattgaatcacaaagaagattctgtgaatgtttcaattgtttatcacactcacgttttaatcgacgttcacgtcagctattgcaattgatttatcagatacggcaagaaatgaataaaaaggttgacctgaatggacagttcttgatcattgacagctttccggtacctgtttgccaaccaattcgaaactatcgtgctaaaatttttcgcggttatgccaacattggttataaggccaccaagaaaatttacttctatggtttcaaagttcatgtcattgttagcgatgacggttacattcttgattatgtcgtaacaaaagcatcagttcatgatgccagggagacagttgaactgctggaaaatacccatccatctaattactatcttcttggcgacgaaggctatttaggcaaagaactgcatcaacagctaaaacaaatgggttatgaactttggacaccatatcgtaaaaatatgacaggagctaaaaagcacaatgatcatcaattgatggctattcgcagaacaattgaaagcgacttttcgcttctgacctattacaatgccgagaacaatcgagcacgtagtctgataggctttcaaagccggttggaaattgcaattttagcttataatttggcttattgtctagaacgatttaactagcaccacgcgttgataaatacttaatcatttgtaaataggtagtttgtttatccggatgctcaaaaaattgttttaattttggccataatattggcaacaaaaaacaactaaagatcaatggccattttgctaaaccaaaaagaacaacgataattggaaataataatcccgcaataatcaacgtcttaattattttaagagcatattttttaccagtataactggctaaagtatggcgcccattgtttaaatcttcatgcaaatcacaagtattattagctaactgcaaagcatagaaaatgagtgttaaaggcaaacatcttatcagagtagttaatgctaagttccaggtcaaaggataagtgccgtaaattgtgacatagatgcttactagcataatgaaatacgaaataaaaaaagataccactaattcacagatcggtgttgcattcagtggcttaggacccgcagtgtaaaatattccaatgaaatatcctacaactcccattattagtactggccagccggtgcgataaaccaaaataatacccggaatcgccgaaataaagtaactaatccacactaagtttctaacatcagttaaaggtaacttcagacgaccaattggatttatatcagtcaaaaaatgtcgatctttgccatgaagataatcatagtaattatcagcaatattaactgctaaatcaaacagaaaaacatctactaagcacagtaaaatgttaatcaaattaaacatgtgatattgttgaaacgacattgccgcgcccaagacaaaccaaattacatttaatggcgccgtataaatctctgatagttgataatatactggccaagataaaaccttcttcatagtaacttattaatcctcccattttttacttacatcttagtctttttctaaaacaaaacatagttactaattttgaagatattatcgcaaactactactttagttattaatagctttcattacaactgatgaaacttcaccactttattcttcaatgaaattttttgcacctcaaagccataagctggtaattcttttttataacgcaaaaaggaatgatctaaggcaaccccagcctgctggccaagctcatcaaaagaaagctcaaagtccccagccttattatctttgatatattgccataatttattatatttgctcattttctaagataaatgttctaaattagatttttcaacaaactctgcaaaaaatggcaacgccaattgtactactcctctttgaggggatgtaatcaattgatcatctaacagccttgcacgatagaccgaaatgtaattaataggcttgtttaagatatcttgcaattgttttgtcgtgacacgatcggttccagctttgattattgcttcgataaaatcgcgatcagttttggaaagatccatatacattctttcataggcattcctaaaaaggtccttttttgcagctcgaattgtttgtttcaaaacttcttcgtttaactgcaataattcccgactaaatcgccaagcataataaccaatcgtttgaaaggcataagcatagcctttaactgcacggctcatttcatccaataccatgaaatcaatttcacgttttcctttagtaaatgctttctcatagctattagctattgttttttcatccaacggtgataaataaacacgattactacatagtaaaaacgtgagggtattattcattctgtacttcggatattctgcttggcaatcctgtcatcaataatgaaatatcttattcatcaccaatcaatgtttgatattctgagccaaaagcccgaacatcgtcactaatttcaatttcatctattccgattagaattgacttaccctgcttttttaaacgacttagcaaaattgaaatatactcatcataatcaatttgctgtgattcttgtagtgcttgcccagtaattccctttcccataatattcaaacttttaacactttttaacaagtcaactaacgaaatacctgcaactcgttgcaaaccatgcattaattgaaaaagcaaatctccttgaccattatttaaacgaataaatatccaattatctaactcttctaaagatctttgaacatttaaaaggaaaactgtttttcttgatcctcttgtgacataaactaaagaagtttgatacttagcatcatgtgtttgcaacccagttaaataatcagttaaagcttcttgctgatcgataataattttaggaaaacgaccaaagttaggcataaatggatttaacatttttgcttccataaaagtctctttttatactttctttataattcaattttttattttatatttctttcccggatttaaaattgaagtgcaacactaagtgttaaacaaaaaggccatgaagacctaaacttgaagtgacgaaaaatcaagaaaggaagatcttcatgaccaattcaaattctagcatttctaagcactatcatcaattaaccagcgtacaacgtggacaaattcaagcaatgctggattccggcataacttcccgtactgttatcgctcaagaagtcggctgccataagtcgacaatcagtcgcgaaatcaaacgcggaagtgtcctgcaaagagacagcagctatttattgtatgagcactattacgctgatactgcacagatttattatgagaagcgtcgcaaaaactgctatcagcgcaatccattgaagcattatgctgtctttttgagaatgctctccagacgctttaaagctaaatttgatgccaccagcatcgatgaattcgttggtgaattcaaaaggactatgccaggctacccttgtcccagcacaccaactgtctatcgctatattgatcagggcttgctggacataagcaatattgatctgcctatgaagctcaaaagacgcaggaacaagcgtcatcacggccatagcggtcatgctttgcacaagaagcatcttggcaattccattgaacagcgtcctaaagagattgaagacagaaaaacgccgctgcactgggaaggagatctggttaaaggcgtcagacgcaagaatcagcctgctttaatgactttgaccgaaagaaccacacgctttgaagtagttatcaagattcctgactatcgggcaagcacatgccaaaggctgcttcaaaatgagattgacagacatcctgcctggtttaaatcgatcacgtttgacaatggctctgagtttgcggatatgaccaagatcaaaggctgccagatctacttcgcccacccatattctccatgggaaagaggcaccaatgagaactgcaatggacttctgcgtcaattcttccctaaaggcaaaagcatgaaagataagtcagctgcttatgttcaacaggcaactgatgccattaaccgcaaacatcgtcgaatccttcaatatcacacagcagaagaactcttcaagcaatatatttcctcatagcctaactgttgcacttaatttgacaattcaggttttatatttcttttataataagttcaattaagttatcaccaaatttgcctaaaaaaataaagcctagcaaacgctagactttatttaaataattatcaaatgattattcttcgtttaatgatgaacggtcgaatgaagcatccttaagttcgtcatcgatagtcttagtacctaaccaaccgatcatttccttcatagcatcggtaatagcttcagtacctggaagcaataacttacgtgggtcgtaacccttgttacccttgtctaagtccttgccagcttcgatgtattcacgagtagccttttggaatgccaattggaattcagtgttaatgttaaccttagcaataccaagttggatagccttcttaacttggtcttcaggaatacctgaaccaccgtgaagtacaagtggttcatttggaactgcttcagcaatttccttaagacggtcaaagttcaagcccttccagccttctgggtaaacaccgtggatgttaccaataccacaagcaagcttgtcaacaccagcagcaacgaatctcttagcgtcttcaactgatgctaattcaccaccatcagcaccttggttttcaccgatcttaccaatttcagcttcaactgaaataccacgttcgtgagccaacttgatgatttccttagtcttagctaagttttcttcagtatcaagcttgtgaccatcaaacataactgatgagtaaccaagagcgatacattccttagctgattcaaagtcaccgtggtccaagtttaagataactggaactgagatgttcattgaatccatttggtcagctaccatgtccttaacgaacttgtaaccacccatgtacttagcagcaccagttgatacttggatcaacaatggagttctagtttcttcagcagcacgtaattctgcacgagtccattccaagttgttagtgttgtaagcacctacagcgtaatggttcttacgagcatctttaaagatttgattaccgttgtcaaaataagccattaaaaaatacctcctaaatatcttacatgcctattgtaccctaataattgaaatatgaacaatttttcacagaatgtaagcgctattttcttattttcattgtttttctcttacatttctttaggagcattgacacctaacaatctaagtgattccgttaaaacgattgatgttgcttgaactaaggcgagacgagcaccaattttatcgtccttggttaaaatcttcacattagcatagtacttattgaattttttagctaaatctaaggcaaacttagctattactgaaggttcaaacttttcggcacttctagctacaattcttgggaaatctgctaaatctttggctacggcaaaagcccagtcatcatcaagagctagatcagtttcgctaggattttcacccatcgcagcagccttacgtaagacgctttgtgcccgagcattagtgtattgaacataaggaccagtatcgccttcaaaacgcacaacttcttctaggtcaaagtcaaaattgtctaaacgatcattcttcaaatcgtggaagacaacggcaccaacaccaacatcatgagcaacttgatcttgatctgctaaatctggattcttttcttgaatttgttttttagcaagtgaaacagcatcctttaatacttgatcgaggaagacaacgttaccttttctagtagataactttttaccaccttgggtgattaaaccaaatggtacgtggtgaatttcatcagcccagtcataacccatctttttcaaaacagtcttcaattcaacaaagtgttgggcttgctcgttacctacaacataaagcatcttaacgaagttatattctttcattctccattcagcagcggcgaggtcacgagttaagtaaattgaagtaccatcagatttaacgataatagcaggattttcaccttcacccatgtcaacaacttgcgcaccacgtgattcatgaagaagacctttttcttttaattcatcaattactggttgcatcttatcgttaaagaaagcttcaccattgtatgaatcaaaagttacgcctagttctttataaattcgcttgaagtcttttaatgaaacctcacggaaccatttccatagtttaactgcttctggatccccgtcttcaagtttcttgaaccattcacgaccttcattatcaagttcgggatttttctcagcttcttggtggaactttacatagtagtggaaaagattcataatcggatcttttttaacgtcttcttcattaccccagtgcttgtaggcagcaatcaacttaccaaattgagtaccatagtcacctaagtaattgattttaacaggagtatagccaaccttctccattgtcttagcaattgaattaccaattacagttgaacgaaggtggcccattgacattggcttagcaatgttaggactagacatatcaattggcacatttccttcaccaatcttttgatcaccgtaatgttctttttcagtcaaaacatccttcaaagtcgatgaaactaatttttcatggtcaatcgcaaagttaacgtaaggaccgactgcttggatattagcgaaattatcacttgataagttatccgcaatatttttagcaatttctgcaggatttttgtgcaaagtcttagccaaaataaatgctgggaaagcatagtctcccatcttagcatttttagggcgttcaattaatgcagcaattttttctttaggtaaatcaacttgactagcaaccaagtcaactacttcattcttaaagtccatcttattcctctcttctaaataaaaaagtctccttctacaaatgtagaaagagacgagttaaaaacccgcggtaccactcagattgatacaaagtatccgcttatttaaattcttgattttatcagtcaaacacgccttcattatcttctagtatctatcttgcaccaacatagactcgcttaaaaagaaaataactactacttttgacttcttggcaaacatgattatagcaggaaaaaacggcttctgccactaatttggttaaaaaaaccattcttgagttggattaaaatcttgaacgctttgaacaaagttttttactgcaattttttaaaaaacgttgcttaaaaagcaacgttcttgttaattatttttaatgattaccttcgtaccatctgggatgtgatccataatccacttagaatcaggtacactcaaacggatacaaccatgtgaaccttgagttcttcccaatttgactgcttcttttaagttatagctataatcagctttagttggcacagagtggaacaagtacacgttatcaggactccaactagtccaattattagctccttcacctaagttataattgaaaaagctgtctccacgaccattttggatcctaaaagttccagttggggtcaatgacttgcccttcttgtagattccaccagttgataacatggtatacaaaaccttgccttttcttaacaaataggtccggtttccttttaatgatacccgcaaagtcaaatccttttcatatggcttaatcttaggatattttttaggctcactctttttcttccaagtgcctgccttgcgcaagtccttaggatcgctatatggtcgatataaagcaccattatctacttttttagtttgttttttcttagttttatttattttcttagttttggccttagtctgcgttgtagcagcttcttgtgagacatcagacttaggtgcgcataccttagctaagccgataattgcaccaaaagctagaacgatactagttacgccgataataatgttttttttcataaatatgttaatcttcttttttattaatatttaactcaattatattatgctttttcgtctttgaagcgttaaaaaacatccctcaactagggatgcatttatttactattagaattttaacatgtttatgccaattctgaatactttttcatcaatttaggcaatactttagaaagttccgttggtcgtaccacataattatctttggcaagcaagtcacctgctaaagaatgaagatagacagcagcttgaacggtttcaacgcctgggccaaattgagcaaccatcccaccgatgattcctgctaaagtatcacccattccaccagtggccatgcctggattgccaattggattaacaaaaatttgaccagtcccattataaacatgagtatgattcgatttgagtactaaaagcgcattagtatctggaatcaattggtttaaagcatcaatactggcactatctgtttgaaacggaatacgaatttgactcaatcgttgccattccatttgatgcggcgtcaagattaagtggccagcattagttggcaataagttcttatcctgactaattaaatcaagagcactggcatctaagacaacggtttgtttttctgaagtacatcttcgcaagataactaaaatttgcttagcgagatcactcatgcctaatcctggcccgcaaactacaacatccatatttttgattaaatctgctaacttagcatcgcgccagttgataaacattgcttcaggcactcgtgcatgtaacggtgctaaattcaaagggtgtgttgcaacagcagtcaaacctgtgccagcattaatagcgccttcggtagacataataatagcgccaccatagttctcactaccaccgatcaagagtacacgaccgtaatcgcctttatgtgtatcgctttctctttctttaattacctttttcaagatatcttcagaaatttcagtcatatttatcttcctccgaaaatccagcgccaaattctgacaaaaaagttcaccttgttattagctgacaatgccttagccttgacgttcatcccattaggattagacaatgaaacaatcttttcattaccagatttaaattgataatcaccaactgtttgatctttcttaattggtgcttctacagattttttattcaatgatgccactaaagttttgccatcagctggatcccagatagtagtcttttgcttaagtcctaaattagtagttgcattatcaccatcaacaactttaattgtcttagcgccattcatttggctaccagcagtcattgttacaggacgatacttggtaaaaacataattcattaactttttagtttgttcaaatctagctggatccgttccgtcacggtgacgtgcgcccattactacagtcagtaaacgagcaccattgtgttgtacagttccgataaaacaagcccctgcagcatcagtagtccccgtctttaagccatcaactggataagcttgatcatattgagaaagcccctttaacatccagttaaagttagccatcttagttacgtgaccagcatctttaaagtttaagtgagctaagcgtgtagtttctaatacttctgggaatgccgagattaatttttgaccgacaatagccatatccttagctgacatcgtattttcagcatttttatttacaccaggatatgcatctttacctaaattgccattaggtaaaccacaagcagtataaatcttggcatcttcaatcccccacttttttacttgagctcgcatttgatcgataaatgccttttgtgagccagcaattgtttgaccaagcagcatagcagcaccattagctgattcaattaaggttgcttgataaagttgtcttatcgtatacgaatgtcctagttttaatggtacattcgaatattctgcattattagctacctttactatcggagccgttggctttactttctgatcccatgaaagcttatgattttttattgcttgcagagttaaataaactgttactaatttagtcatcgaagcaattggcaaagttttagtcgcatttttggcatacaaaatttgacctgaatcactatcaattgcaattgctgactttacatttagtttaacttgatcagcttgatagctactagttgtatctgcgctaactggtatagttgcaaataccgcaccacaagaaaaaattgatactgcagcaatcgtggtaattgctgcacgttttatttttttgctaaaaaacatgaatttccatccttttttataattaaagtattttatgcttacattttaccaaatatttggtatgattattcatgtaccaaagaaaattgcccgcttggcggaattggcagacgcgcagcgttcaggtcgctgttcaggtgactgagtgaaagttcgaatcttttagcgggcatcataattatgtgtaagtgttgagcaatcaacacttttttcatgcctttgctgtataatatatgtaaaagagatagaacagttagaaacgagttgattatcatgcaaaaaagacttacaaaatcacaaaataaaattttagctggcgttttgggcggtattgctaactactttgatctagatcctgcttgggttagaatcatcggtgctgcattgatattattcacaggtgtatttcctggcgttgccttatatattattgctgctatggttatgcctgaacctggtcaaagcgcacctaaggctgaaaagcacacagttgattatcaaactggtcgtcctaataccatgaatggtgacttcaccaagtctgacgatcaaaatcctgactcaactgagaaaaaggatgatcatgcagaataaatgaatgctataatataggtccttggcaggggcacaagttgatttcttcggaggtcaacttttttctcccaatttaatgtaatcgctttcataatacgcaattatgtggtacagtaacagtgtaagcaatgattgaattaaaagataaatattctaattatttatctcctagataaggagatgggcactatgattactatccttggaattacatttttggcacttgaattaattggagtcattacgttaacagcagttgaacataattaattctaaaatcttattacactcctaaaatttattgatatttataaaaaaggcactacagaaacaaatgatatgaaccccgaaattcggacaagaatttcgaggtttttattatgactaaattatccaaacaagacaaaattgatatttacaataattggaaaaattataatatatcagctaacctagctgctaaggaatatggggtaaatcgtacaaatttgttttatctgattgccttaatagaacgtcatgggatagaaattcttgataatagctataaagattactcagttgaatttaaagagaaagccatcaaaagagttatttatgatcatgaaacggctcgtcaggtatcattggatttaggactgcccagccaaggtatgcttcacaattggattcgcaaatataaagaagacgggtataatgtcattaatcacaagaaaggcagacctacccatgaaggacaaagacaaacagattcaagagcttcagaagcaaataaaagacctcaaacagaagaacttaagacttactgtcgagaacgaatttgtaaaaaaattgagcgccttagtctccccaagaaccgaaaaccaacagcacaagagatagtttctgcggttacgcaactaaggcaagaactccacgtaaccgttaagtttgtgcttgatacgattaactccaatcctgatcttccgcatttatcacgcagtaattattactacactttaactaaagatgataaagatttaaaaaacgaaaagattatggaacggatcaaagaaatatttgaggagcacaagcatagatatggctatcgtagaattactgcccaattgcgacgtgaaggcattatagttaatcataaacgtgttaaacgattaatgaccaagatgcatctatatgccattgcaattagacgcagatttaaatattcaagctacaaagggactgttggaaaaatcaagcccaatttaattaaacgaaattttaaagcaattattcctgatagacattggtactcagatattactgaatttcaccttaatggagagaagctttatctgtcgcctattatggatggatgtacgcaagagattgttgcttatacattaaatcgtcatccggtactaaaacaagtaatggacatgctggatcaagcttatcaaaagcatcctgcactcaatgggttaatttttcatactgatcagggctggcaatatcagcacgctgttttccaagcttggcttaaaaatcatggtgtttcccagtctatgtcacgtaaaggaaattcattagatgatggcttaatggagggcttctttggcattcttaaacgaaaaatgttctatggctttgaaaagacattcaaaaccatgggtgaattagaacaagcaatcaaggaatacattcattactacaatcatgatagaattaaaacagtactaaaaaaccggctctataatttttgtactgagacgtaaaaagtagacaattaaaatattggattaatagaggcttgacttcgatactctttcggggttaagccttttaatctgctctttatcctttcgttgttatagtattcgatatattcctcgattgcttgagttaattcttgaagattatgatacttgtattcttgatcatagaacatttcagttttgagcaggccaaagaagttctccattagcccatcatccatggagttgccctttctggacatgctttgagtaataccatggagttttaaagctcgctgataacgagggctttgatactgacagccctgatcagtatgaaaaatgcagttattaagagctgtttctttggcaaaagccttgtcaagcattgtcattactaaatccatatctggatgtttggagatagtataagaaactatatcgccaccgcagccgtctagaataggcgataagtaaagcttttcattattaagatgaaattcagtgatatcagtataccattttgtgttaggcagggctgcgaagaaatcacgatgaattaaatttggagctattttgccaatagtacctttatagcttgaatatttgcgcttattgcgcctgatgcctttaagacctaatttatgcatccaatagcgaacggttttctccgtaactttccagccctctctgattaactgcaaagctactctgcgatatccatagcggccttgatgatgattaaaaatctcatggattctagcaataagctttgaccgtttaggcttgacgggctgtcgtttgataatcttgtagtatgagcttctggcaattataggtagctcagggtgctctacaatcgcagctaatacataatttaaactaactttgaattcttgccttagatccgtaatcaccctagctatttcttctgatcttcttggtccaaggcacttagtttttttacgtattcgttcacaatacgcaatcgcaagttttcttctttcagctgctggatctctttctccagtttcttgcgagatttctgcttttctttggtcacgggcagggcgtcctttctgtttgataatgacattatacccgtttttcttatattctctaatccaattgttaagcatgccaatacttttaaaccccagttccaaagacagctgtaagtatggtttattgccaaagattgcttgttcaatagttcgctgcttaaactctttggaatagctttggtttttagtagttaaaatttctattccatgcatatcaattaatctaagcatatagtctaaattagctagattcattctgtacgctttagccaattgactgattgagatattttcatctttccatttatgataaatttctattttttgttctttattaaatttagacatagtaaacattctaagctaaatagtgaattagttatccgacgggataattgattcactatttttattcttttgtagaattaaagtagtggtaaaacgatatgccctgaggtctttagacacttgatgtcgcataataaactggcagttttacttaagttttcaatagtctcttcgaagaatgtggacactagatgtcgagtttagaaaattagatctgatttcttaagtaaatacgttttactactaagttttggaggtttttattatgcaagttacttttggaattgatgtaagcaagtctacttctactgtttgtgaactaattggtgaaagcaaaaatgaactaaccattactaataatcgtcctggttttattcaattgcttcatgaattaaccgctttttctaaacatccgcaaattatttttgaagctaccggtgtttattcacgcagactgcaggcttttcttgaagactacggctatgaatatgttgttattaatccgcttaaagccaaaaaagagatgaatatggggctacgctacaacaagaccgataaaactgatgcttatcatttagctttaattcaaagactttatcgccatccggttaatcaaagcgaatcccaaacttataagcagcttaatgctttgagccgcttctatgaccagctgacaagtgacttggtaatagctaaaaatcgacttcaccaagctctacaatcgacttttcctgaaattgaaaatttattttcttctgctaaaggtaaaaattactggcaaatagttgtgcgatatcctcattgtgacttagtaagaagagaagataaaaaacagcttattaactggttaatgagcttaaaggggattgcttttaaacacgctctaaggactgcagataaattaattgaattagcttatcaagcttatccagttgtatcttgctctagcatagaagtcgagcaagtgcagtattatgcacacagattgcttaatttaagtgatcaaagagaaaatttaatcgcaagaatggttaagttagcgaagtctttgcctaatcatgatttagaaaacctagaaagcattccaggctttgcacagaccactgctgtcagagttttagcagagttaggagatttacgcagatttagtaatcctaataaaatcaatgcttttatcggaattgatccaggcagatatcagtcaggagaaatggactctaatttaagtattactaaacatggcaatgcagtcgcacgtaagttgctttatcgagctattggacaaattgataatgcagctaagacaaatccgtgtcatatagcagattattatgaaagcaaaaagctatcctctcaaaccaaagggttcaaaaagatagctattgcttcaattcataaactaatcagaaccatttatgccctgattatcaatgatcaaccatatgattacaacgtagccacacataatcaaaaagactttagtcgtaattaattgatcaagtacattataacgctaagcccaaaaatcagatatggatctgggcttatttgtcgtgtctaactaaaaaaataaatcgacactaaaagatgtttaagttgaaatttaaacaaaaaatgaagccaaacttcttattatgcttgactttacgtagaaaaagacctaaaagtgtctaacttttagaaactgtcaaatcttttgtgtaaatagttctttctcgtaaattgattttttaattatttatttaatcaaagtaggattctaaggtgtcctgaacctgaccaaagcctttatgaattcgattgaaataacggtcattgtagctcattgcctgaataccaataaaagcatcaagcgactgttcagttggaaactctgccttaggcttagctttgcgcttgatcacattgttaaatgattcaatcatgttagtcgaataaattgaagctctgatctgcttgggatagttataaaagaccagcagatctggttctatgtctttcaagcttctgataacatggctgtaaaccttgccccatttggtatagaagtcatgcaggacagctgtggcttcttctttgtttgtctgttgatgcacctgtttgaattcgttcatgatcttttcacgatcgtcgacgcgtactttagcgcagatattgcgcatgacatgaaccaaacagcgttgaaaatgagctttaggataagtcctggccaaggctgttttcatgccaacaacaccatcagaaagaaagagttcaacttgcttcaagcctctggacttcatgttttgaagcatctctgtccagacttcaatgttctcactaggagcaatgcagtagtcaatgacttccttatgtccattaggtttaatgccaatggcaatatagactgcttcacgctcaaacgtttctcggcgcaaaggaaggtatgtcgcatccaaatagacgcagaaaaacttgtcgcttagcttgcgtttgtggtaagcctcaacctttggaatcatctgcttggaaatatttgatacctgagctggactgtaatggctgccatacatcttttcaattagatcggctatttccctggtagttacgcccttggagtaaagcttgataatcatgctttccaagatatccgagtgctgcttgtagtcaggcagcgtgtgctgatgaaattgaccgttgcgatcccgaggcacttgcacttcaattgggccaaattgcgtatcaactttgcggaaataagcaccatttctagagttgccagtattccagccatttctggcatagggatcatagcccagaaaggcagtcaattcagcttctagcaagttattaacagcctgttgtagttctttgcgcaataaatcatttattttgtctggattgaatagagcttgagcaaaatctttggtaaaatcattcatgaaggagttcttctttctgtatgtgttttttttgttcaaaccaatcatacgagaaaggaactcctttttctaatgtttaaagaaataaatttaaggaatcattcatccttacacaaactattttacagtctcaacttttaggtctcagtttattttagttatttaaatgactttttttgcttattatatggcgctttttattaattcattgtgtaatttttacattaatcgaatcctaaaaaaagtggctataatatctgttcacctttaatcataagattttacgtatatattgtatagttctaaattacactttatatacacttagcccatgattatgtctatgttatttaaatagagctcttattttctttcgacacctttatcatagatcaaataagcaattttggctgtataatttgtcttcatgctttaaagctgggaagaccacggtaaaggttgagcccttgcccagttcactttcaaggcggatcgtcccatggcactgctgtactgcgtgcttgacgatggacagaccaagtcccgtcccgccagtcttgcggttgtgggacttgtcgactcggtagaaccgttcaaagatgcggttttgcgcttcaagcggaatcccgatccccgtgtcagaaacccgcaaaatagcttgcccccgcacttccttgaccgcaatcttgacctggccgccaggattgttgtagcgaatggcgttgtcgatcaggttgtaggcaatttcataaaccaagcggaagttggccttgatttctgtatcggccaaagccgccttcagctcaatctcgtgcttgtcagctgacgcctgcaaggcttcgatcgcctcggtcaccggactcttcaggttcatccggacctcttcaaattccggattttcgtccaggtgagacagccggataatgtcatcgatcaaggtcaagagctgagctgaagattcatggatcttccggtaaaaggctggccgatcgtcttccttgaccaggttgttttccaaaagctccgctgaccccatgatggactgcagcggcgtcttcaattcatgggacacattggccgtgaattcgcgccggacctgctcttcatggtattcttctgtgacgtcaacgaccaagatcgaagtcccttttaagaccttccgtgaaaaaatcggactggcactaatttgaatgttgcgcccttctctttccacgatcccttcggtggggacggtccgcttgtcttgatcgatgatctttttaacatcatctggcaaaacttcagaagactttgatcctaagagcgatactaccgccggattggacaagaggacctggtcgttcaggtctatcaagatcaggccttcttgcatggcatcggtgaccgtcttgaactccttctcccggtggtggagctgctccatttggtcagcaatctgcttgttttgactgtcaagccgggttaacagcggcttgatttcttcatagctcttgctttcaagcggctggtccaggtctaactggttcagcggcttgacgatggactgcgagatcatcttagctacgaaccaagaagcaatcacggcgatcagcaagatgatcagcatcagcgtcagcaattgcaagatggtcatccagatcgaattccgcgtaaccgccacccgaataacgccgccgtctttcagctttttggcatagtacatcgtaaccgtcgacagggtcgtgctgtagcgctcgctttgcccttcgccctttttcatggcttcagcaacttctttgcgcttagcgtggttgcccatcttggctgggttttcctcgttgtcgtagagtaccttgcctttagcattgatccaggtaatctggtaattttctccttttagctgggttaagtacttccttcccccattgttgaccccgctggctgccaaatcggcctgcgaagccaaggtgttgacctcattgtgatcatagtcgatgcctaaaaaaagcgcactcaaaaccaccgagcagaccagcatgactgccgttgataaaaagactgcccgaaatatttttttaaacattaattcccttcatggtagcgataaccgaccccgcgcaccgtttcgatatggctaccagcctcactcaatgtttgtctcaaggttcttacgtgaacgtccaccgtgcgcgtttcaccgtaaaagcccgtttcccaaatttgatccataatttcttctcgggaaaaaacggtccctggatgggtgatcaagagcttcaagaggccgtactctttcaaggtcagctcgatttcctgaccatcgacataaacctcatgccgcttgagcaggatcttgatcccgtctttctcgatcttgtcttctttcttgtggttggtccggcgcaggaccgccttgacccgggagaccatttccatcatgccaaaaggcttggtcaagtaatcgtcagccccagaatccaggttcttcaccttgtcatattcggctgtcttagcactagcgatgatcaccggcaattcttcagttgacgagttgccacggagctttttcaaaatatcgctcccatcttcatctggcagcatcaggtccaagatgaccagatctggatgcttttccgccagggccttgacaaaagtcgtcccgtcttcaaagccacgcaccttaaagttcatcgactccagcgtatacatttcgattttgcgaatgctttcgtcgtcttccacacaccatatttcagtcataaaaaaattctccctaatctatctgcaaatagctactctaattatagcttagaaacatttgctatgcagatagatcaggaagaatattaatttagcaaactttccaagacttatcttccggccttgccagttgccacaaacttggtccacttagcaacgttgaccgcgtggtcaccgatcttttccaagtacttggcaaccatcatcaggttgatcaggtattctggattgccatccttgctgaagttgttgatcaggatttctcgggcatggtcaaagtcatcgtcaacaatgtcgtcgcggtcgataaccgcttgcgccagttccagattcttggtggacaaggcggttacggcatcatcaaccatgctggttgaggtttgcaccatggacttaaggttcagctggtcattggcgatggacaggtgttcatttaacacgagttctgcaatatcagcagagatttccccaattctttccaggtcgtaaacggccttcaaagaagaactgatcacccgcaagtcagtcgcaactggctgctgctccatcaacaggcgcaagcagctgtcttcaattttccgttcgctcttgtggatgcggcggtgcaagttgactgagtcttcagcttcatggtagtcgcccgtaaacaaggtgttggttgcttccaaaatggcttcctggcacagcttgccgatgtcttccatggacttttgcaagttgtccaattcttcatcaaatcttgatctagtcattgtttctgcctttcttactctatctaattattactggtctttaaccgaaacgaccagtaatgtatctttcagttctttcatccttaggcatggagaagagttggtcagtttcaccgaattctaccaggtcacccagcaagaagaagccagtcttgtcagaaattctcacggcttgttgcatgttgtgggtaacgataacgatggtgtagtccttcttcagttgcagagccaattcttcaatctttgaagttgaaattgggtcaagggcactggttggttcgtccatcagcaagacttctggcttaacagccaaggcacgagcgatgcaaagacgttgttgctgaccaccagacagacccaaagcagacttgttcaaacggtccttcaagtcatcccagatagcagcttgctttaatgaggtttcaacgatttcgtcaagttcttgcttgtcggttacgccgtggatcttgggaccgtaagcaacgttgtcgtaaacgctcattgggaatggatttggtctttggaagaccatgccgactctctgtctcaaaacagtgacgtcaaggtcattgccataaatgtcggtaccatctaacttaactgaaccgtcaatccggcagccttcaaccaggtcgttcatccggttcaagcagcgaagcaaagtagacttaccacaaccagatggcccgatgaaagccgtgatttcattctttggaatgtgcatgttaaggtcatgcaaggcgtggaaatcactgtagtaaaggttcaagttttcgatagtaattttgtcttccattattaatttcctccgttattgcgcttacgcatcttgtctgaaatgcggcaggtaactaaagtaaagagcagtgcgagtactactaaaacagctgaagtaaagttggcaatttgggttgccttagggttcaaagccccttcagttctcatgacccagatgtgcagtgaaagagtttcaccacttctgaatggattcaaaggtgaagtaggtgaagtaatcttccagaagttgtgccagttgatgtaagtggattgaccagacgtgtacagcaaagcggcggcttcaccaaacccacgcccagcggccatgatgaccccagtcaagatttgcggcatagcagctggaatcaagacttttctaatggtttctgacttggttgcacctaaacctagagaaccttccttgtattcaattggcaaggcacgaattgcattgttggtttcagtagtgatcaaaggaattgacaaaattgagatcgtcaaggccccggccacgatgttccagctcattcccgtccacatgatgaaggccaggtagccgaacaaaccgattacgatggatggcagagaagaaagtgattcgatacttacttccagcatggtcaagagcttgccttccttggcgtattcagccaggtaaaccccagccccgatcccgattggcacggaaactaagagcgaaaggaaaactaagtaaagagtgttaaagaattggttgaagatcccgttgccggcagcccctaagaagtctgggctaaagcccttcaagccatcaaagataatggtaaatgtcaaatacagcaagaatgctagcatcagccagccgatggcgtaaaagacgccggtcataaaccgatcttttttcttagcacggttcattatttatccttctttccgttagccagtttgtgaatgagcacaatcaagacaattgagatgatgaacaagagcagcgccatggtccacagagccaggttgtattccccgccttgggcagtgttacccatgtcggctgcgatggcactcgtcaagttgctggttggtgacaaaaggtttgccgcaaatgagcgagtcttaccgataaccatggctacggctaaggcttcaccgatcgctctggccaagccaaggatcaccccggtcaagatgccgcctgaagctgctggcaaaacaactttgccgattacttgccagcgggttgcgcctaaaccgtaagcaccttcacggtagctcattggcactgacttaatggcgtcagcggaaaccgcggtgatggttgggaagatcatgatggccaaaacaatggatgcggccaaaactgagtacccacccatggctggatggaaaatatttttaatcaatggaaccagcttggtcatcccaaaccaaccataaacaacggatggaattgaaacgtagatttccgtagctggacggaagtacttttcaccgatctttggtgagatttccgtcatgtaaactgctgagccgatagcaaatggcaagcagataaccagggccagcaaacaggtttcaagagaacctacgatgtaaactgctgcaccgactttcccgccaaacaggccggtcttgtcaagcggtgcccagtcgctggtaaacaggaattcccagatgctgtggtgagccttgataaaggtttgactaccttggtagagcaggaatgcccccatcaagagcgtcaaagcaacaatcaagagcccgcaagcaatgtatactgcccgccagcgcttatcgctagcgatggctttttgaactaccttgtccatgaaaaatcactctccttttacttgtgttctttcttagccttgtctgaaagcttagaagcaacaccgtagcccatgccttcaacctttgattcgtattctttacttaacatcttctttaaaaaggccttaacagcagccttctttggttgacccttggtgtacatgtgctcgtagttccaaaccttgtatgagccgttgtaaacgttgtccagagttggcttaacgccgttgatggcaactgcagttacgtctgggttaccagtcaagtatgataaggcaacgtagccgacagccccttcaacgctttgaatcatttggatcaaagtaccggagtcgtcagtttccagtgattggtttgaacgactggcagtcttgtttaaagcatattgttcaaaagttgcccgggtacctgaagaagcaggacgtgagatcaaaacaatcttgcagtcattgccgccaacttggttccagttggtaaccttgccagtgtaaacatcgatcaattgctgggtggttaagctcttaaccccggcgtccttgttgacgattggggcaatcgcggtgatggccacttggtggtcaaccagcttggatgcggacttcttgtctaatttttcttctgcgaacaagtcagagtcaccgatgtcgatggttccatctgagacttgttgtaaaccttggcctgacccaccaccgttggtgttgatcacgctgtctggattttcatccatgaatgatttagctgcgctttggactagcggcaacagggctgaagaccccgcagcgttaacagtcccagagacacccttggtgtctgcctttgaactgccaacaacgcagccgacgactatagccagtagagcaagtgcgataaccactactctagttttcttgcctaacataattatcctccttgaattcttactaagtaaatagtaattaatggaggttaaatacattcagggggaaatgttaaatcaaagtaaaatacttaactttgtttaaattctggccggattttggaaaaatctttaccatttttcgaaaatcggttaatattctaacgttatttttcttagtttacattagcttaacaaagaaaaaaatgtaccgctttcacccttgctagttctatttaacatcgacttaacaatctttgaacctgatgcttttgttaattttttgtgagatatcacctgcgtgatgcattatgtaaccgattaaatctattcaaggctataaatagtgatatagttatgacatttgcttaagcagacaaaaagccagtggcatccactgacttttatctagctattcaattagttatttagttaaccgtggttgaccgcaaaggcgccgacccagaaggagacgacaaccaaaatcaagagcagccacaaaacaatctgccagatcaaggctagagtaatccaattcttcaaagggaccagattctcatccttgcgcttgataaagaggtagatggctggtgctaagccaaagattggccagacatatgcggcaaccagcagaaccaccatccaaatgttgtaaattggtgaatttgagtctttcattatctttcgctccttcactaattaagattttcccttatttctatcttaattatagcaatttacgctttattcttcactttctactacataatacctagcatgataatacattttttactggcttacttggcaatgtagacgtgttcgaagtagtaagagccgctgatcaaccagcaaggtgttttcagcctttgccagcagcttcatccacttgcctgagttgtagccattagtagaggtcatgcagtccaggaaggaaatttggtcggcaaagtccgcattccagccgctgatcgtggcttcaaagttaccagagtccatcttggcaaattgggacttggttggcaggctttgcaccttgacgtcgatttgcttgccaaaagttgattcaagagcactctggaagtattcgccgatggacttggacgtgtgccgtaatcaccgtaaaggacagcttctttaagccaagttccttcaacctttccttaaagtagctttgggccagctgcttgtggtggcccgttactagcaagctttccttggtttgagagaggtcggtaaaatccttgtcacccaccttggtcatgccagctgccgtaaagttcttagagcccgtgtagccgccgcccaaggtcttggctaaggcgtttctgtctagggccatggagatggcttgacgcatcttggtgctctggaacttcttcattttcaggttaaattggaagtaagtcgtcccgttggtctttcttacaacatagtctggtgacttttgcaggttcttggaggcttgtgagctcaggcttgccgtgtccagcttgccatcttggtagaggtagtaggccgttgacggagatttttccacggcaaagtggatgctttgcagcttaacggctttggcgttccagtagttcttgttcttgaacatggtccaggacaagttggagcccgtccagcccttttgcaagaatggcccgttataaacggtcgtttttgatgacgtaccgtactttgagccatacttttcaactgcggtctggttttctgggaaaaagactgagaaggccatcaaaagcttgaagtatggaatcttatgttccagactaacctgcagcttgtatttgccagcggctttcacgcccagcgtatcggccttctttttaccagcaacgatctggtcggcatttttaatcccagagaaaatgtagctgtattggctagctgtcttggggttcaccgtccgcttccaggaatagacaaagtccttggcagttacggtttcgccattagaccatttagtccccttcttaaggtcaaaagtccaggtcagaccgtctttgctgacagtcgtcttcttgaccagtaccttaaccggcttgctgtctttgcccagctggtagagcccttcagtcgtattttcaatctgctggaaggacgtggtgtcggtggctttggatgggtccatggtgatgattttcgcactggtcatccagtttaaattctgcttgacagatgctccttggctcttgccgcaggccgccagcatgctcccgcacataaaaataacagcaccagtcattaaagtcttacccttgttcatcttaatacctcattagctaacacgcataacaaaaaatcttcagttaacgatgacgccgataaaccgggtgtacttaatactgtgctgttaaattatctttgattcactttgtctaaaggacagttaaaacatgacgcggtttgctcttgcagcgacaccgctaagcctgattgtattaacagtcagattaatcatgctttttgcctcctttgctaaaaataattgtttttatacacatttcttgcgtttcttatgcattatataataacactaattatcgtctttgcaagagggagtggcagttttttgacaattagggttgattcacttagaaattgcacaaaaacttactcaagtaagccatcccccggccaaaaatttactcaactaccaggaaaaattagacttgacaccttatcagtaagatttgacaaagagccgcaattttttataacaaaaaaatcaaactgccatcacaacagtttgattttcttttatttatccatatgtagtctaactaaaatactttctaccttactacctaagacgctttggactaaccctgtcttcaatgtcaccaagccataaaagacaaccccagcacctacagctacaatcactagcaccaatgcattaaatctatgatcaggattgagaaacttgcctagtcccatttcacataatttaaccacaaggaacatgccaactgaaaatgctgtaactccagccagccttctactagttcgattcaaattaaaatcatactgcacttccaaatgttttaaagaaagtgccacaataattaataaacctaaattagtagcaaccagcggaccgtataccttaaataggaaaatcattggatattgcaggatcccttttaaaatcaatcctaaaaccaggtacttgatagccagtccatttcccgaaagaccttgcaaaatcgccatcagcaccgtaaataatcctaaactaatcgcggtaaatgacgacagatatagtacgttgctccccaatagatctggaccatagaaaactgtataaattggcctactgatggctgccatcccaaaagcagctggaatcattacaaataaaaataggtccatcgtattagcaatctgctttgaaatgctcttatagtctcccctagtatgcgccgctgataaaagtggaatcgcggttaccgccattgcactggccagcgaaacaataatcatgattaacttattagcattcaaaccaaacaaggcataccagtcctcaattgtatctgaactagcatgaactagactggcaatcatcgggtggaaggtatattggtcaaccaatgaaaataaggtaattcctgaatcaataataatgaaaggaattgcttgtgcaataatttcaccaaataattcagtcgttgagacccgcaagcgattattagaatgggcaaccaaataatctagttgttttcttctagaaaacaaaaaccaaattaataagccaattccaaataaagcaccaactgcagccgctaagtttgactgaataactgcatgaacatatgaaccatgttgcagtttcataattacaaacgccgttagcaacatccagactacccgggcaaactgttcaacaaactgtgacatcgcacttggcatcatatcggcataaccttggaaatagcctcgcatgatactcaaaattggaataattaaaatcgcataagacaagctacgcataactgcaacctgtcttggatcactttgactcccatttgaagctaaaagcggcgaagcaaaatacatgatcgcagctgagacaatacccaaaacggtcattaaaattaagcctttgcgaaataatttgcggccaatcccatattcgtttagtgcattatacttagctacctgcttagcaattgctcctggaattccggctgtcgagattaagataaaaattgtataaatgttataactacgcgcagtcaaagcattggcaatattgccgtaggagcccatccaggcataccacggaataatatacaaagcacccaaaattctcgaggcaattgagccaaaggtcatccatgcggaaccttttagaaaagtattttgtgtatctttgctatttaagttattttcttccattaaaattttcccaataaaagtctcaactaatcaattcaataaatctaaataataagtattcttattattttttaggaaaatctaacttatttagcaacaatattgacaatcttgtttggcacaacgataactttcttaacgtccttgccttccaagaacttctttacgtgttcaatttccattgcttgcttttgcaagtcatcttttgcagcgtctttaggagcttggaacttaccacgaagcttaccgttaacttgaaccataatttctacagttgactcaactaacttagctggatcataagttggccacttagcgtaagtaattgattcatcatgaccaaagacttgccaaatttcttccatcatatgtggagccactggagctaaaagcttaacaaagccttctgcgtattcccgtggaatggtcttagccttttgagcagcattcatgaagaccatcatttgactaattgcagtgttaaagtgtaatgattcaaagtcttcagttaccttcttgactgtttctgcataaaccttgtcaagttcaccatcattcttatcaacgattctttcttgtggaatggccttcaaatcaagatcgtttacaaagaggcgccacacacggtccaagaacttcttagttgaagcaggaccattgtcatcccagtcaattgatgcatcaagtggacccatgaacatttcgtacattctaagtgaatctgcaccatattcatcgatcacctcatcagggttaactacattacccttagacttagacatcttttcgtgattcttcaagattaagccttggttgtaaagcttctggaatggttccttagttggcacaacacccaaatcgtaaagaaccttgtgccagaatcttgcataaagaaggtgacgcacagcgtgttccgcaccaccgatgtaaagatcaactggaagccactttttaagcaaatcgtagtcagctaattccttatcattatgtggatcaacgtaacgcaagtagtaccagctagaaccagcccagttaggcatcgtgttggtttcacgcttaccttttctaccgttttcgtcaacaacatttacccagtcagtcaagtcagcaagtggactttccggggtaccagatggcttaatgtcagttgcatgtggcaagcgaagtggtaattgatcttccggaactaatgaagtggttccatcttcccagtgaataactggaattggttcaccccagtaacgttgacggctgaagtcccagtcacgcaacttgtagttaaccttcttcttaccacagttatggtcttcaagccattcaatcatgcgctttttagcttcttcattatccaagccgtctaagaactcagaattgaagtgcttgccattacctgtgaaggcttccttttcaatatcgccaccttcaataactgggttaactggcaaaccaaacttagtagcaaaagcatagtcacgatcatcatgagctggaacagccataactgcaccagtgccgtagctagctaaaacgtagtcagaaatccaaactggcacttccttgccattaactgggttaattgcataggcaccagtgaagacaccagttttatctttgttcaaatcagttctttcaagatcagacttagattcaattttcttaatgtaagcatcaactgcttctttttgttcaggtgtggtaatttcttgaacaagcttgctttctggtgcaagaactgtatagctaacaccaaataaagtatcaggacgagtagtaaagacatcaaaagtcttgtcgctgtcttttaccttgaaagtaacttgcgcaccttcagaacgaccaatccagttacgctgcatttccttaacgggttctggccaatccaaatcatcaaggtcttctaataagcgatcggcatatgcagtcatcttaagcatccattgacgcatattcttacgatatactgggtagccaccacgttcagttttaccatcgataacttcttcattagccacaacagtacctaagtctggtgaccagttaacaggaacttcagcttcatatgccaagccctttttatacatttgttcaaaaacccattgcgtccacttgtagtaatttggatctgaagtggttacttcacggtcccaatcatatgagaagcccaacttgttcaattgacgcttaaagttagcaatgttgttcttagtaacaacttctggatcttcaccagtcttcaatgcatattgttcagttggtaaaccaaatgcatcccagcccattgggtgaagcacattatagccttgtgcacgcttcattcttgcaacaatatcagttgcggtatagccctctgggtgacctacgtgaagtcccttaccagatgggaatgggaacatgtccaatgcataataattcttcttatcagggtcagtacctgtcttaaaggtatcatgctttgaccaataatcttgccatttcttttcaactactttgtggttatacaagataaactctcctttactatcaaaaaacgccctatgaaaaaatcataggacgaatcatcgcggtaccacctaagtttcacaaaattgtgacacttaattgctccttaacgcggatggcaacgctaggttttattaagagacgagttcacaattttattctaagacttcgcaccaaccagtctctctctgaaaaaaatatccttgttactacttctcgacctttattttcttatagataatgattataatttaccacaaatgctataaatttcaagaggggagtacttttttgattaatacgaaacgaccacctaaggacaccttaatacctggtatctgcttcgtggttatttatgctgtctgggccgcactggtttcatccggctcacaatttattcacaattttgataatgctgtggtcaacattgtttgcaacaataatccagctaatgtcgcttttgctaaagattttactaatctcggcaatacaagcgtgatcacaattgaaacaatcattgttttcatagttttactggtctttaagcaatatgcatacgcttggtttaccgctggtgtcatgatctgtgctaatggctataattggattatcaaacacgcagcaatgcggcagcgtccaacggtcaagcacttagtttatgcggatggttatagttttccatcggggcactcagttggtagcgcggcgctatttggtgttttgattatcctaaccattcttttagtgagaagcaaattctggaagactttattgattattatttgggctttattcccactgatgattggttacaccagaattttcgtccacgtgcactatccatctgatgtattcggcggttggattgaaggaattacctttgtactgcttggttattccttcctctatcacttctacattgagccgaagatgatcgacatgaaacgaaaacaatagaaatcaaagcaatttaaaaggcatcgcatgatgcctttttctttatcctatttttgcttgtaaatgcgtcttttgaaaaattgaaattaggttttctaacgctggcgacttttccccgcttttgctagtaatgaaaaagacaacatccattaactttcgatctagtggcaacaagttaattggcgtttgttccattcttctgataatacttgccgaagaaatggtaatacccacgccgtgaattgccaagttagttgcagtaataatactattagactccatcacaatatttttttcgagtcttaatctctgaaataagccattaacttgatgccggatagctgaaccaggtgaactcaacactaaaggctcctgcagtacctcttttagatcaagttcatccgaatttaagataaactttcctgcttggtaatatggtgaggctggcgaaatcactacgtaatagcgttcctcgccacccgcaaccacatctaaactcgagtcaagtgcttctggcgtctgaccaatataacaatccagctcgccattaagcagtcttctttcattttctctggggaaattttcaaatagctgaatcttgacgttggggttttcttgcaaaaattgcggcaaaatttctggcaataaatatgtacctaagctctccaaaatgccgattttaattatctgttggtcaggatgagtatatgcctccagcttgcgccctaattgctgcttattatatgaaacattctccaaatattgatagtaaattagacctgcaggagttaacgtatagggtctctcatctcggttgatgatcttagtgcctaattttttctcaattcgtccaattagctgcgttaaataaggctgggaaatatataattctttagctgctctggtaaagttactctcttttagcagaacatctaaaaaatgttgtaattcttcaggattattcatgatcaagcccccgttatctaaaaaatgatagcttcacagctatcattatatcttatcgactaggcgtttttcacaaagtctgctagttcttcttcagaaaattcattgccataatcttgttctaattcttgcaagatttgcttgggactgcgcttcatccttctaagcatgttaatcgttttatggattgctgcaacagttgcctcatgtatgccttcttccatgccaagctgctttgctgcttctgctacttcttctgtgttcatgacgtgttgcctccattcttcggttctacgataattgttcatcgactttttaattcgactgacgagttttccatttgaagttggcttgccttcaatcatgcgataaaggtcatcaagctcaggtctgatcttgccttttgttccctttgtgtttaaatatattatcgcagaatcgtcatttaattcaactgatgggtcttccttagcagtataaacaaaagtatatcgcttcaagccttttcctttgggatcaaacggcagaataaaaattacatatgcagcgtgcagctcgccatattcttgttttcgtcgtaaaaagccatcttccatcatcttgaacaggtattgcctggctcgtttatccatgtctgctttatgcgcgacctgcatttccacattgtaacgcctgcctctgctatccgtaatcaggacatcaagaatcgaaactttctcttcttggttaaaagcaatcctttcttgcgtgcatacagtgatatcttgaatgtccaaatgtggtagaacctcattcaaggacatacgatagatctctggatctctcataacattctgaaacatcaaatcatccgtaaaacctaatgcttcagacacatttagttctttctctttgctcatgcaaagtcctccttaaataatttgaggatatttatcctctattatttattacgcaaaaaagtcgcaaaattttttgggaagttagaaaagttactattatttttgttagtaagaattagaaatcatgggtttttattcgaaggtaaggaaaaaatgactccaaatagaaatacagacataccaatatttaaattgatatatctgtatttttttatactctatctttatttctgcgaagcgccagtaataacatcggtaacatgcttatcctcataagcagtattggcagcaattctaccaaaggtaaagatatctgctaaagaatttcctcctaaacggttaccggcatggataccaccagcattttcacccgctgaataaagaccagcgatgatttgaccgtccttatttaaaacatgagccttagtgtcgattactaagccacccatagtgtggtgaatagcaggtcttcttggtgtgacataaaatggcgcaacttcacactttagtcctaatacattcattactacaatcatgaaagaattaaaacagtactaaaaaaccatactccgatagaatatcgaaatatggttttaaataaagcagttcaataatatgtcccaaatttggggttcatatcaaatcaaactgaagtgattttttattctcttttattttcaattttagtgatagaagtcaaattgaccaatcgccattgtttctttaataccaccagtttcaagaaccgacttatcaatggtaatcttcttaagagttgctgcaaagtatcctttaaaagcatgccccattgccaatcctgcggcttctgaattacccaagttaactactacacctaagtcatggtaagcatatttatccggtctagtttgacccataattctgctcttaatatcttttgcagcgtagttagccattgaaagagccaattgaccagtgttaggatatggccatttcttaccaggaaccatgacgcttgaaacatcgcctaagacgtagatatcatcactttctggcgcggttaaatgatcaccaaccatgacccgaccacgacggttcttaaatccagatgcctcaattactggactgccactaaagcccatcatccagattctagtacctgccttaatttcttgcagctcagcattgtctttttcattagccattttatacaaaaccgaggtagaggttacttcattaacataagctggcttaataatttcgactttatttttcttaattgtgtttaaagcgtaatcaagcaatttaccttggaacattggcaaaagacgtggcgaaccatcaatcattctgatggtaatttcatctggttgggcgccagccatttgagctagttctgggcgaacctttgcaatggcatttcctaattcaattgcttgaaaacctgccccacaaattactactgacaggtgtttagaatcatggtcttggcgataagctttcatttcgacataaaggtggtcgcgaatagcttcagcttgttttacattgctcattggcaaagcattttcggttacacctttaatgcccatattgctcaaggtaaagcctaagccaacaacacaatagtcatatttaagtggagcatgatcctttaactcaactgttttatcagcaatattaactttttcaacttcatccgtaatcacagtagtcatcttcggattaattacatcattaatttcatatgacatcccagtgtagggaatttcaccagtagccacttcatataagcgaattgtttcgtagtggtatggattacggtcaactaagataatcttaacttgttcacgcaacttcttttgcaaagcgacaactgttttcaagccggcaaaaccagcacctaaaactacaactgttttcataattttcaacctctctaaaatagaattcctaaaaagtaagttattaagtaagtcagtgaaccaactagcaacgtttttactcctgtgataaatgtctctgtcttaacttgtttaccaattaagatcttgttctgcttataaacgaacggtacaattattactgttaaccaaaccgtcttaggagcaattcccaaaaacggtaggaggaagattactaaaaatgctaaaacatttttgatactaaaagcaatcaagccaccttttttaccaataaagtgaataattgtggtgcggtgattatcctcgtcctcttgggcatcgcataagttattagctagcattaaattagaaatccataatttatcagctaaagctaataagaagatacgaccgattgtgatccagttccaatcaaaagcttgaaaactattgatataaacactgagcagtacaatcatgaagcccattgtgaaaccagagaacaattcacctagtggcaagctggaaataggatgcggaccaaatgaatataaataaccaaccataaaacagaacaagcccatccacaatacaggcaagcctactttagcgactagatacaaacctaataaaattgcaataagactaaaggaaataattaatcccagaactaaattaggtgaaatattttctcgcccgataatgttagtcttctcttggtaattcttgctatctgcgtgataataatcacagtagttatcaaacatatctactaccatgttaaatagtagcattgcaatgaagaagactagggcaaatccccagttaacttggtgataataatacacgctgtagcacatccctaagaaaaagggaatgacactagcggtttttgctttaatctcaattaattctaaaaatacacttaatgacatcgatccacatcctttcaaaggatcactattctgttaactctattataaggaaatctatcatgaataactctcaaccttggcaaaaatatccacttattcgtaaaccgcttgaagaagttaatcaattaattcaggcaaccatccgcactccatattcagacttgcaagatgcactccttgaaatggctagtaacggtggtaaatatttacggcctagtttactaattttgtcagctcaaattgctagcaaaaaagaaactgtatcaaaacaaattattcaacttgcctcatcaatcgaaattttgcatatggcctcattaattcatgatgatatcattgacgattctgacgagcgccgcggtaaaattagcatccaagcccgttttggcaaagacaccgcagtttacgctggcgacttgctttttacgcacttttttgacctaattttgaacgccatttccgaacaagattacatgatcaaaaatgctcacacaatgcaccatttacttgctggtgaattaggccaaatggctgaacgttttaacctaagccaagatttcaacgactacttaactaatgttaaaggaaagacagctgcactttttcgtttagctgccgaagaaggaagccattttggcaatggagatgagcaaactactcaagctttagcctcctttggtgaaaatttaggcattgcttttcaaattgttgacgacattcttgattacactggcggtaagcacctgaacaagccaacgctagaagatttgactaccggcgtctactctctacctattctgctagctcttagcaaaaaggaattacgagagcaattagtaccgctacttgaaaaaaagcgacaaatgagcaaaaacgatatcgaacaaatccaaaagattttgctaaacagctcagtcattgaagaaactcatgccttagctgaacaatacactaatcgggcattagctaacttagcccaactgccgcaaactaatgcgaccgtcttgctcaaaaagatgacgcgtaaattagtcaatcgaacgctttagtctttgcgtcccaaatgaatcgcacctgcaccgtaagttaacttagtaaccgctactcgagtaaaaccattttgctcaagtagcttttttaattgctcagccgagagaaattctttacttgtttttgacaaatactggtagtccttgatattaccgtgtgtcaacttagcaaaatacggaaaaattttaaaataagcttgccagcccaatttaactaatgcattagtgggctgagacatttctaaaacagcaaattgtccgcccggcttaagtacgcggtagctttcctgaatcgtcttaacagcgtcagggacattacgcaggccaaaacaaatagttacacaatcaaagctattggccgcaaaaggtaaattcattgcatcccctgcaatcaactttatcttggactgcagctgcttttgacgaatctttttttgggcaatcttcagcatctcctggttaaaatctagaccagtcactaatttagcttttttagtcaaatcaatagttgaatcagcgctaccacaacacaaatctaagcaaatagaatttttatttaaatctaactgccgtaaaaatttcttacgccaactcttttgaatccctaaactaacaatattattcatcaaatcatacttaggtgcgaccctagtaaataggtcatgcacatcttgttctggcactttattcgttagcataatgaacctctataatcctaaatcagcctttttcaattcacgataacgcggctctgtctgccataatttttccggtgtaccctgcatattaatttgtccatcttcaataaaaattacttgatccatctgatcaattccttgcaagtggtgtgtaatccaaattaaagttttaccggataattccttaataaacatattaattacagcttgctccgtaattggatccaagccaactgttggctcatcaagtaagacaattggcgtattcttcagtaagattcgcgctaaggctaaacgatggcgttcaccacctgaaaagcgtaatcctgcctcatccaccttagtatcaaggccatccgttaatttttgcaccatctcggccaaacctactcggtgcaaaacgtcccatagctgctcatctgtggcatcttcattacctagccgcaaattattggcaatcgtggtattgaacaaatatggcgtttgattgatgatgctaaagtaattggacatttgatcgccaaacttgctggtatcaattccatttaaagttacgtgtcctttagctggtacccgatcacctctgagcaaggcagctaaagtacttttacccgcaccactacgacccaaaatagcaatcttttcaccatcatggatatttaagttgatcccatgcaaaacctctttattagtttgagggtaggcataatgcacatcagttaatactaaattaaacggtgcggttaatttgattggtttatgcttagtccgatcaggagctggcaaattattcaaacgcttaagcgaatctttgtagatattcgtctcttgagcagcagtcggcaaactggcaaaagcctcaacagtcgggaataatgccaaagcaaatgccgcaatccaattagtataataagttgaacgcccgccaaatctggcagcaccccaaattactaggctcacaattaccaacacccagaagatttgtaaaacaaagtcgcgccagcgatcaaattttttcatcttcgcgttgatttgcaaaaatttatcttgatcattgacatgcaaggccaagtattctttgctgcggccagacaaaatccagtcatctactcccatcacattatcagtcaaatcaacgtagagcttgtcttgaaccgttttttcatagctttgccgcgcaccattgattaagactgaccaaataggaatagcaaaaataatcaagaaaaacaggatcaacatccaaatgcccatcagtggggaaatgatgcctaagccaattacgataattgcatacaagccccaagctacaaacattggaaagatcgttcttaggtaaaagttttgaatatggctgacatcatcagacaaaagtcccagaatatttcctagctgatacttactattaaaaatagtcgcatcgcgctccaatgagtcataaagctgttgtctaaatttggaggtcattttgagcacccaattgtgactaaccagccgctcaaaataacggacagctggccgcgtaatcccaaatgctctagttaagacaattggcacatagattaacaaaatattttcaggtttagctgctgaacggctgattaaatagccagcacagaacatcaagcccccgccacagacgaaagttaaaatgcccagtgcaatcgccaaaatcaacgttttacgatatttttccaaatatgggcgaacccaacgatcattttttaatgctcttaaaaccggaatcttattgatcattgttttcacctctcattcctgccattaacttgcagaagtagccttgattttgctgcaattgctcataacttccttgctcaaccaattgaccgtgatccatcactagaatatagtccatttcttttaaccaatgcagtctgtgagtcgcaaagaagaccagtttattttgcattaatggcatcatccgcttctttaagtcaatttctgtttcgatatctaagtgagcagtcggctcatcgaagatcataatttttcgcttaggatccaaaaatgctctcgctaaggcaattctttgtgactgacctccagacaagacacgcttaccgcggccaatcaccgtatcaagtccgttaggcaaatcatttaacaaggcatccagacccatgatatgaatcgcctgcttaatttcatcatcacttgcctgcggattataaaaagcaatattttcacgcaagctcttagtaaaaacgtatggctcctgcggaatataggtcatttgacgctgccaagcaggaatattcatggtcgtagttttctgcccttgtagttcaatttgcacttgatccggagtcaaaaagccgctgagcaggttaattaaactagttttaccagatccgctcattccgataatgccaattttcttgaatccttggacttgtaatgaaaccggtccaatttcggttcccttttgataagtaaacttcaagttcttgatcttcaattgatcttgagctgaccaagtttttaaaggtaaatcattagttttttcctctggcagattaatcaattcgttgatccgcttaaaggcatttttaccattcaaggttgcatggaaatcccccgcaaaatctcgaattggcaaaaaataatctggcgccagaatcagaattcctaaagcaggaaaaagtgcaattttaccattcatcaagtcaaaaccaagaaaaacagcaatgattgcaatagacaaggtagtgaaaaagtctaaggcaaaagttgaaagcattgctacttttagcaccgccatcgtcttttttctaaaaccctcactcaagttaaaaattgacttggaatatcttttactcaggcctaaatacttcagcgtatcaattccccttaaagaatcaataaagttattagataaaacctgaaagttaccaaattgtttaattgctcgatcctgtgcagcatgacctaggataatcatgaataagacaattaaaggatacatgactagcagaatcacagctgatgtccagcttaaaaacagcatgccgacaaagattaaaactggcacaatcatcattgttaaaactttgctgtagattaacttaatgtattgcctgacctcatcaacaccatctagggacatagtaatcaaactaccggttccttgtttttgtactaaagcctgtccatcacgaaagactttatttaaaagctgctgtcttaattcttctgcaacccgaccggaatatttttctaacattgaatctctcagtgtgctgatcaattgtctggcgataaagcaagctgcaaaagtaattagtagtagccaatcgagaggttgacctgcccacaatttgcttaagactgacgctagtgccaaggcttgtcctactataaaaaaagcttgcagaatctcaagccctgcaagtttttttaagattgaaccagcgccatcaattttaaatagctgtttatcaatcattatttaacctctccgattcttggcattgaaatccgcttgcgaaaaatccaatatgcccagatggtgtaagccaagacacatggtaccaagatgcaagtagcaacagtcataacaatcaaagtgtagttagatgatgatgcactatgaatcaacaaatcatatttactgctgattgatgaaatcattactcttgggaataaaccacagaagattaaggcgaccaatgagatcaacgttaatccactgcaagttaaagccattccttgcttgttagtgaaagtagctacatgtgctgctacagagaaaccaacaattaatgctaagcatactaaagttgcaattggatgtactctcatgaagtcggtttggaaaatcaataataaagcaaagacaacttcaccgacgtagagtacccagtataaagcttgtgcatagttttgtgctctatctgaaataacgcccttagttttaatagtaatatagtttaagccgtgcaaatagcaaagaagtgttaaagcaataccaccaacgattgagaaccagttaaagtagtcaaagaagctagctgaaatattgcctttagcatcgattggcatccctttaatcattgagataaacattaccccaaagagaaaggtggccattacgctaccgatcgccattgcattatcccaaatatgcttttgatatggagcacattttgctctaaattcaaatgacacaccacgaataattaagccaactaagatcaataataaaattaaatagtaacctgagaataaggttgcataccagtatgggaatgatgcaaacattgcaccaccagcagtaatcaaccaaacttcattaccatcccaaactggtccgattgtcctaacaacttgatctctttcaggttcattatgagctaaagtcttcacggccattcctaccccaaagtcaaaaccatcaaggaagaagaagcctgagaacaatactccaattaagataaaccaaagtatttgtaaaaatgacattttaaatggccccctttgagaacggatcaactactttgcttgcctcttgagccttatcatattcatctggatcgttgtgcatgaagcgaacaaccaatgcaatcatgataattgctaaaatagtaaataagcagaagtaaacaatatttgatgttaaaagtgaagccactgaaacattcggtgaaacactttgatcaatagtaaataatccataaactgtccatggagcacggccaagttcggtaattaaccaaccggcagtgttagccaagaatggtgagaatgtaagaagtgcgaagatccataatagccaacgatggttataaagggtttctttattcttacgagtcatgattaaaccaacaattgccatcaagaataataatgcagcaaaaccacacattactctgaaggaccagaataaagtattaactggtacatagtagtccatcttgcgaccatcaatatgtgtaccatacttcttttcaagttctttgttaatttcttccataccttttacagaaccagtagtcttgtggtaagaaagaatacttaacatgtctggaatatcaattcccttaacttcatgggtctttggattagcaattgcaactaccgtccatggagccttttctccagttgtcttataaacagcttcagttgcggcgaacttcattggttgatcatgcaaagtatattgcatttgcatatcacccacagcaatttcaccagctgagaaaattaacattaagattaagcctaaacgcattgtcttacgatagatcttcttgttaatgtctgaaaggttacgtttcttcaatagttggaaagcagctaacccagtcaaaattgtagtaccagttaaaagtgcaccaacaattacgtgaccatattcatacattaattgtggattcttaagaagtgctccaaagtcagccatttcggcacgaccgttgcgtaaagcaaagccgacgggatgctgcatgaaggagtttgctgttaaaatccataatgcagaagtcattgtcccaaagacgatcatccatccaaagaataagtgtaatttcttccccactttatcccaagtaaacatccacaaaccaataaaggtagattcaataaagaatgacaacaatgcttcaaaagcaagtggagcaccaaagatgtcccccatgaatctagaataatcggaccaattcataccaaattggaattcttgaatgataccggttacaacaccgacggcaaaactcaataaaaagatattagcccaaaacttcaatgtcattaagttaagctattgacttttgaaaactgatctttttaggaatcgaatcatttggattcgattcttttttttgcaaaaataaaggcgaaaagacaaacgaaatttaaaagccaagtctgcagtatattacatgtatcgcgtggcctaattaaaaaagaaatacaaactacgcttatttagcatacgcaaaaaagcatcaaattggctatctaaagccaaatgatgctttaattgtttttttctccaatgtcaatagcttaacttaatgacattgcccaaaacttggtcatctttttatattcaggcttgcctgtatgaacatacattgattccataattgcgacaacgaatatcgtaccaattgaaaatggcacgaagaaaaagtgaaagatcgtcgtcatagcaaattggaatcttgctaaactagtaatatccatttttacgcccccataattcctactcgcattacaagtctctgccaaaaaataacgttcgttattcagctcaatttaagtgtacagctacttagatttactttcaaggaggcaaataatgcgctttcaatagtgttatcttatttttaggccactttccatttataattatagcattgtcaaatatagatttattccaaccgcaaaaaaagtactaaaaaaggaccaaactggtcctttttttctttatttttattattttcatcatgaaaatatttttgattttttaaaatttatttagttgttattttatagattctacacttttaattgattagtcaaattttgcgtagttttcattttcatatttagttcttttaaatttggcgaaataagactcaaatatagcaagctagaagcaaagatttctgcaaatagtgaattaacagcgccgtaacgcaacaatttttcatttgatggtaacgcaattatagtatcagcaatatcctttaagggcgaattctgggcacgagttactgcaattattttagcttgattttctttcgcctgttttgccattagcagtggttcttgagttaatccactataagaaaaggtaattaaaatatcttctgtcttaatattagctacttgctctaaagcaatgtgcgaactttggacgaaagcagcatcttttccgctacgaattaatttgtaaaataaatcctgtgcggctaagccagatgcaccctctcctgctacataaatcttctgtgcggctcgcattaattgtaccgctgaagctagagattgatgatcaattgttttgccaatgtctgcaatatttttttctaaactaatctgtaatttgtaaagcacactggtcggctcatcattttcattaataattgtatccaccgtattatcttgcttgccaggtatttcttgtgcacaagctatttgaaaatctttaaagcctttgaaacccaattttctacaaaatcgaatcactgatgcgccacttgttttagtaatagcacctaattcctgcaagtttttacttaggaaaagagttgaatctttaaaataaacatcagcaatcaacttagaagttttattcaaattaggatatacatctgaaatcttatttgccaaattaagcataatatcacctttcttctatgtcagccttctaaaaatgattttcgtactcgaatcaataaaatcaagcaacttcacatactcaggtgaaataaaaccaatcacattactacgtgcttcaaaaggtaaatttgacttaatcagactaacttcaccactatatctttgagctaatttgttttgcattgtaatagtgcctttacgcctatttaaagtattacaaattggaatatcaggttttctaggcaaacttaagcgaatcagcttttctggcatgtcctttcttacttcaatcacttgatcatacagctgttgatattgtggcaatagcgaacattctatgtttaaaatattatctttttgataatctacaatataccgaagatttttgattgatgccttgctatcgccaataaacacatcatccacatttgcttcatgaattaattcaacagctgcaacgtaaggcgaaactccacgatgcttttctacagttggcaagccttcatatagtgggaaacgtttaagtgcatccccaggaacaaaagcttgagttcttaagccatagtcctttaacatccaattcttacgtttaaaatctgtccatcccatacctgtatctgtatgcggataaaaattatatgttaaagctaatttaccaaaatcaacccctgcatttctggcacgatctaaatagtccagtgacacaacacttgcatttaataaaataaagaaatttctttgtagctttttgattaaatcaaagtcatcaaaaccataatctaatcttaaggccttgaatcccttatcttttaaggcttcaaaatcgcctcctttaattcctagcttttccaatgtagccggagaaacatcaggaattacttcaagtcccaattcatcgcacaattcaaaaaatctcggtaatttttgatccagatctgaataatcttcttctggaatctgaagtgacgtaaaaacgtattttgcaccagcttgagctgcttttttcaaatagttttcatcataatcttggaaatatacagatattcctagcattttttcttctccgttaaaaataaaaatcattgtaatagttacaatgatttcaattacttctttaattttatcattcaggaaagacttcattaattcttgcttcatctattccaaagaaccatgttaaaacaaagccacctacataagaaattaacaaagcaatcaagaattcaacctgttgacctggctgcataattaacagtccaaataatccagataccccctgtgagacagtacctaaatggaataatgatgctgcaacaccaccgaaaccagcaccaagacaagccgtaataaatggacgtcctaatggtaaggtcacagcatacattaatggttcaccaactcctaaaatagctacaggaattgaactcataaccatatttttaaaacgcttatttttgctcttaagccaaagagcaaaaccagcaccaacttgaccacctccggccatcattaaaataggaagtaaatagttaattccatgagttggaccagtagggtcattcagcataacatgaattggcgttaaagcttgatgcaaaccaacagatactaatgctaagaaagttgacgataaaatataaccgccgaaccagcttaacttatcatataagaagtccatagccacgtaaataatattggttagccaaccaccaactggttgtaagaaaaccactgaaattaaaccacaaaagatcagggtgcaaagaggtgttaagaatgtatctaaagcattaggcataaactttctaatctgtctttctgtccatgcgataaagatccccataaacagtgcggtaagcaaaccaccaacaccagcaacatatggcttattagtgaatggcattgatactgccagtgaatttaaagggtacgcagcaaaacctgttaaatttaaacagaatacaccaccaattccacctagaattgcactacctttaaattctttagctgcattcatccctacaaagattggtaagaatgcaaatagtccccatcctattgttttaatagttaaataccaccaatcattggcaaaagcactaccagattgataatcaataacattgcagataccattgactaaacctgcagcaataattcctggaagtaaaggaataaaaacattagcaatatgatgcaatccacgttgtaaaggcttatcatgtttagctttttgtgccgctttatttttttgagctctagctttaacttcatctaatgtttcattggaatcatcgccgccttcttctccaagtggcacaccggctaatttactaaattcagttccaactttagtaacctttcccggtcccagtacaacttgtaaagtttcagactgaactactcctaaaactccattaagccgctttaactgatctaaattaatttttgaatcatctttaacactaatccgtagacgagtcatacatgaaataactgcggaaacgttgtctttaccaccaatatcattcaaaatgctactggctaattcactatctttgctcattttttacacctcctaatttaaattatctaatgcccattgataagcttgtggagctgctgaagtccaataagcccaattatggttgccaccgttgtctcttacaaacttaacactaatgtcatggtttttaagagttttcacaaagcgatcgacattttttactggaacggtagtatcacttgaagtagtctctacaaagaacttatctttctctgatttactattaatgtacctagttggaaatacactatcataaaatttccaatcccagttactttttccatcttgaaaagcatactgtgaagttttaattgggttgttattcggcaagcggtaccaaactgcaggagaaattagaacaccatttccaaaaatatctggatatttcaaagccaatctggcagcaccatatccacccattgagataccaccaatacctacatgtttaggattggtttctgtcttatacaatttattaatagtagggaccatgtcatcaacgatggcactttccatctgcatcccaccttgcttttgattaatataaaagctattaaagccatcaacaaaaactacgatcatctttttattacagcgatgaatttctccatcaagaatttgttgagaattaaatctttctagcaagtttctatgattaccatagattccatgcaacatatataaaacaggatatcttttactgctttttggattgtaacctgctggtaaatatacatcataattccaatccatatgtaattttttcgaatacatagttgttgtaacaacttgactcttatgaggtgtaacagccggagtagctgtagcctcttttttctgactgcatccagttaagcctgctcctaaaagtaaaactgaaagagcaactaataaaaaattgcgatgtttcattattctccctcccttacttattactaatattcattagcaaagtagtattatcaaaactcttttgaaaaagcaatcactaatatgcaatttttgtacaaatagaaataatatttcattattctttattagtaagcgcttacttaaatataaaaatatcacttttaagacatataatcaatgatttttgaaatttaatttcaaagtatagctaattatttaaaacttggctgacattgttattatttttttctaatagtttacttgcatcatcactatttaaccctgtttttgccataacaattgctaatcctacatttttatcagctttaagcaagacatctttcgcctgctctattgatacgttagtaactgacgtaataattctaattgctcgatttactagctttttattagtaggcaagacatcaatcataacattttgataaacttttccttgtttaatcattacgcccgttgaaatcgtatttaagatcatcttttgtgcagttcctgctttcattctagttgatccagtaattacttcaggccctactacagcttcaatagctatttctgcatgttttccaattaaactattattaacacaggcaattgaaattgtccctgcaccgattttttgtgcatagtctaatcctccaataacatatggagttcgaccactagcagctaatcctagaactacatctttactagttaaatttagcttacctaagtcttcagcagcaagtgattctgaatcttctgcaccttcaacagctaaatacattgcagttttaccgccagcaattaatcctattgcacgatcagggctaattccatacgttggtactaactctactgcatctaatatacctaatcttccactagtgccagctccaatatatattaatcgtccaccatcatggtatttcttagaagccatgtcaattgcctgagcaatttgctcctcctgagttcctactgcttcagcaactttctgatcttctttattaatagttttaaccatatctaaagttgacatattatcgatatgcatagttgcactgtttcttttctctgtagttaaatccttgatattcatattaatcattcctttcttttaatttttcgagaagctttcctgtagcctccatttcttgttttacctcacctaaatcacttgaaattgagcataaataaagcacatttgaaataaacatttgagcaaaagttgaatttatagcaccaactctcatcagcgattcatgatccggtaattttaaatttatatctgctaatttactcaaaggggattcggattttctagtcactgcaacaattggtgttttattttttttagcttgtttaactgcaagtaatagttcctgagtcaatccgctataagaaaaacatatcatgacatcttttggcgttgaatagtatattctctctaatgcaatgtggacatcatcattataaaaaaccgtttttccacttctaatgagtttataaaaaagatccttagcagaaaagcttgaagccccaataccagctatatacacagctcgactttttttaattaaggatacagctttttgtaaatccttgatatcaatagtcttagataaatcttcaaagttttgactcaaactaacccttaatttagtcataacttcatcagctttgtcatctttagttacaatcatatctattggcttaagttgtgactgtttgacagtactttgagctaaatcgatttgaaagtcctttaaccctttataatttaattgcttacaaaaacgaattactgatgctgcagatgtattagtataattccctatttctttagcatttttatttaacaaaatttttggattttcaagtaccgcatcagcaataatacgtgatgatttttttaactctgtataattctctaaaattctatctctaacattcatttaatcaccttgcttttaactctattttactttcatagaaataatatttcaatatatgtagatataataaaaatactgaaattaaatttccagtaaaaaagccacatgctctactttgcatgtggctccttcaacttaatttttcttcaattttcgatctcgatacaattgattcaatacaatcgagactacaataacaatcatagaaacaacgtaaacagcttttaacccgcctaacaaaacttgccgtaattgtggcactacattggcagccagacttttggcattttctgcagaaacaattttattcatcatttcttgattcaaccccgatctcttgcttaacccatgcgccaacatcgtattaaaagcaatcccgtagatagaaaccatcattgtctgtcccagatacttcatcagcgtattaaacgaagtggcaacgcctatgtcatccttaggtaccaaaacctgcgatctcacctgtgaagctgtcgtaattgccccaaaggcggtcccattaaaggcagcaataacacagaagacccagaatgatgtgtaaatcggcactaaaatcaaaaccaaatcggccacaactaaaaccaataacatataatcatatgtctttttaatcccccagcggcctagcatcccgccaattaagaacgaacctacaatccacattaatgaactaggcgttacagcaaaaccggctagagatggattagtaccattaataccttgcatccaggtaggaatgtaaaattcaaagccgattactacgccagaaatcaataacgtaatcaggttaattgcaaggaactccttatcttttaacatagtgagtggcattattggatcaactgcgcgcttttctgctctaaagaacataattatactaattaccactaaaacggctagagcggccattatggcgatattagtgtttgaacctaaatcttgtaagaaaaacatcaaagctagcaataaaattactaaccaaatggttccctgcaaatctaacttagacttagagctatgtttaggctcttgcaaacaaaaaattacgagcaaaaaggcaattattccaattggcacattgatgtagaaaacccagtgccaggatagatgctgaactataaagccacctaatagcggtgcaataactgatgctactccccaaaaaccagagttaagacctaacattttcgctcttttttgcagagcatataaatccgcaataatggtgatggcaactggctgaaccgcgccagaacctaatccctgaattactctgaataagataagctccaccatattttgtgcaagtccacacagcgatgagcctatgacaaacaacgcaattccaaacaaaaaaactggcttccgcccaatgctatccgccagttttccatataaaggagttgaaacggccgtcattagcaagaaaattgatataacccaattcataatctcgagcccatctaggtcagaaactatggttggcattgcagtagaaacaattgtcccttcaatggcagtcataaaagttgtcataaaaatcgcaagcgtgactataggcacgtttgtttttttcattcttttttactttctctttttatttattgcttatttttaatataatcaagcaaatcttgtgttttatcagtcttttcccatggcaaatcaacgtctgttctaccaaagtgaccgtatgcggccgtttgttcatagattggacgacgaaggtcaagcatcttaatgataccggctggacgaagatcaaaaacattgcgtactgcttcagttaacaaatcatcgtcaaccttaccagtacccgcagtatcaatcataattgaaactgggtgagctacaccaattgcataagccaattgaacttcacagcgataagcaaggccggcagccacaatatttttagcgacataacgagctgcataactagctgaacggtcaacctttgttggatccttacctgaaaatgcaccaccgccgtggcgagcgtaaccaccataggtatcaacgataatcttacgaccagttaaaccagaatcgccctttggacctccaataacaaaacgccctgacggattaatcaaaaacttagtcttttcatctaggtacttggccggaataacttccttaatgactaaatcaatcattgcccgatggatttcttcattagaaacttctgcatcagtttgagtagagataacaacagtatccactcttaatggcttattgtttccatcatattcaacagtgacttgagccttagcatccggacgaagccaatctaaagtatggtcttttctcaaagcagcaacacgtctcattaaacgatgagcaagcgaaattggtaatggcatgagttcaggtgtctctttaatcgcaaagccaaacatcaaaccttggtcaccagcaccaatttgatccaattcatcgttatcagacttgttttctctagtttcaagtgagtgatcaaccccaccagcaatatcaggtgattgctcatcgatgtcaaccatcacagcacagttattgccatcaaaacctaattctggacgatcatagccgatcttcaaaatagtcttccgcactacatcttgaatatcaacataagcgttggtagaaatttcaccaaagacaaaaaccatcccagtagttacgatcgtttcacaagctacgtgtgaattaggatccttctttaacatcgtatctaaaattgcatcagaaatctgatcagcaactttatccggatgtccttcagaaactgattctgaagtaaacaaacgtctttccatattagtccccctatatagacattggctattcggttacaaggcatcttcactaatcatagtgaatcctctcaggacttgaaccgataaaataataattttgcttgttcgttctttttgcataaaaaaagactaccgcggcggcggtagtcccgaacaatggaggatacagggctcgaacctgtgacctcctgcttgtaaggcagatgctctcccagctgagctaatcctccattagtgacccgtacgggatttgaacccatgttacggccgtgaaagggccgtgtcttaaccacttgaccaacgggtcatatctcttaatcaagagcactttattataataactaatcatgttttaaaagtcaagaactttttttatttatttttattagttattaccaccgtgatctctcaatcacaacgtttattatattacctgatagtccctaattatgcaatagttatttttaaaaaatttcaaataatttttgataattcgctttcatccagtaataataactaattccattaggcattgtttcccttacatcgagaactggaatattatgttgctctgctagtttaaccatgccactaactgtactacttgatgcttgaatattattaacaaagaaagcaatttttctagctttaattttgacttgcatctcatgaataacttgcgcactcggatccgtttcattttctacagcttcttcaaatgcctgattgccaatcttaaaatgacaccgttctagtgcataatcaaacacgggctcactaacataaaccggtttatcttcacgcccattaattttagcagcaattttctttatactatcaatcttttgcaaatagcttgcagcattagacttaaaatatgctgcatgttttggatcaattttacttgctgttttaactagataatcaacatactttttaggcatgtttaagttataccaaatatgaggattatccccctgttttaatcccatcaattgattaccaactttaaccacatgaatatcattagcattggctaaattagtcatccagtcatcatatcctagaccgttggcaataacaatattagcattagctacttctttggcagagccagtcgtaggctcaaaatcatgtggatctgtatcgccgttttttataatagcttgtacatgaccatgtttaccaactatatttttagcaatatctgcataaatattagtagaagttacaatattaactctatgcttagcagtattctcttctccctttgtcgaacaagcggaaaatgttatagctaatagagatattaaaaataaaaatggaattagttttcgtagcttcacgatatttcctccctttctccattatatatgaaaaattaggtagaaaaaaaggaactatgttaacatagttccaattcatatatatttacggaatgtgagggatttagtaacgatttttattaattttttccggttcttttttctagatttatgcgtttttagtttttactaattcatattaatttttaaattggagaccttttcggagaccctataaaactttgtggctcttaacatctattttacgtgaaaaataaagccgcccacaaccaaactgtgagcggtttttgtttaggtcaaatcgacttgaaaattctgcattgcaaccaaaatttattatagcacattatttattctcattttggcagttttctaagatcatgcaacttagctagtaggtgtaccctctcccatgctattttttaacttttcaggatctgcacgccaattttttagcgtttgatttggaccgccttaaagctatctataaaatcaggcgactttacaagcaccaaaaaagcttatatactgaatctaaccatatagacagtatataagctttaatttgccactagtgttactccctagtggctttttttataagttaatgcaagttttcggagaatttcatctaaaaattcagacggtacactgcatacatacttacattctctggctttcgaccgagaatcaattgaacgttcatgatccagctctaccctgccgtgaactggcaaaccttctggaatttcaacgtgtagtggaaattctttttcgttagtagtaatagcaaccactttgatcactcctccacacatcatattgaaatcatcgtttgacacgacaagcgctggacgatagcccgcttgttcatgtcccttggttgggtcaaagttcatcatgataacatcaccttgatggaagtcttttctgctgttcaaattatcacctcccttctaataaggacttctaaattaaaagacttcgcgcccaactggtccgccccagtcctcttctttggacttgccaggattttctttttcccagtcgctccaatattttttatagtcaaagcctttgaaaagctcttttaagctttcaggctctttttgttttttcaaaacgatttcattatttttgttaactgttacatcaaatttggtcggtaattcattgatgccggctttgcttaaaatagttttaggcagtcgtacggctagtgaattgccccattgtttcaattccacattgcacattgttataaatctccttacaagtcttaattaaacctttttatttagtaaatacttttgtatctacatttgcaataaaaattaaaatataacgcaaaaaagccaccccagaggacgaatcccccgaggtggcttattgcacaactattgattaattttgacaaaaaaattaaaagcctatatactaaatcttgttcagagatcagtatataggctttgtgttgtcgttagtttttgccactaacggcttttttattcctcttcgtaagattcttcgagtgctttcaaagcttcttttaagaaagctttaggagcttcatcaaccttacgccaatgtcttgcacttaggtccaaagttgtttcttgctgaacttcagcaacaccatgaactttcaatccattaggtacaggaatatgcaatgggaactcattatcagttgtactaataggtactaccttaacaagtgactgcgttaatctagtaaaatcatgatttgacacaactaaggctggacgattacctctttgttcatgtccaagacttgggtcaaaatcaatgataataatatccccttgatgaatatcaattgccaaaaaatcaccccctttctaagtattgatatttaccaagaaatttctttcccaacaggtttaccccaatctacttctttagattgaccaggatgttccttattccattttttccagtaagctttataatcaaagccttcaaagcgttgagcaagcttgctttctttttttctttttaaaactagttctttattcttaacctcaatttcgaatgtagccttttctgtggtaattccaatttctcttagtaatgatttagataacctgattccttgagaattaccccatttctgtagtgtaacctccattattaataaacctccttgaaaatgttgcaactatagtatataccttcggatatactagtgcaataaaaagagccaccccagaggacaaatcctccagagtggctctttcgttgctatttaaaactgataatttaagtatcaaaaaagcccttgcggcacagcaagagcaacaaacaccgactagacggctagacacatgcccaaagtaaccagcttcgggactttaaacgaaagtgtatcctttcatgtccaccactattatatattaaaagtgaacaatgtttcaatattttgttcttattttaaaatttgctaaaatataaatggttgtgtggaacccaaccaattccaaattatcacaacctagaaagtgttactttcatgtctataacagcttttgtggctactactttttcaagtgttttagccactgtaattgcttcatggatcattaaaaagtttatgaagtaaaactcaagagagcaagtgggtaataccactgctctttttattatatcattacacaaaaaaagagccaccccagaggttttatcctccagagtggctcttaaaatgcattttaattcacttcattaatacttatatgcatagaagcttaaagctacatataaaggcaccattctgcccgataaagtcattttatcatagaaacacaaaaaaagagctacttcaggaaattaatcccaaagtagctcttttattgtccaatataaattacatttacgattatagcacgatataagcgcgattacctgtcacatatacctgcttgcctttgtgtagctctttaatctttaaaaagcgtccgactcttccctggatctcgacttttgagttaagcttcaagccgtagaccttgcctgcgtcagcctttggtgcgtccagggcgtgggtgtgaggcagaacaatcttagcgacagcgtgttttgagtcgttatatgcgatagggttagcctttacgtaaacggcacgaccgtcaaagtattggttcttgccaaccttcacagcgccattttccaagccaaacacctgccacatggagccacacggttttagcttgtcagattcccgcttgtctaactttgaactggtgtagacataagcaccttttgaattagatactactgcgacagcaccaatattccacttcacaacgggatgcagagagagcgattctacgctcttgttcgttgatttgggcttagaactacctgaattagcctttaaatcgatcaagcagatattaccgtcaacgttataccccttatagttatcggtaaattgccagattgcaacaccgtccatggatgggaagtaattaaagtcagcggaatcttgacgacccatgactttatatgaagctacccataaacaagttccgaatgactttacaattcgagctgtgttgagccggttacgcaaaacataagcgccagcatagacaagtggcttataccctgcttccttgatcacttgcatagctgctatgacagcatcggtgtttgaaccgacagagccgttgacgtcgttgccgctgccctgctcccagtcgtcagcgatgtagctaccagctgggacgccataagccttagccttttctacggcatacttagcttctgcccgtgccaatgacacagagccagagtgtgtagcataaaagtagccgccggttaaaagcccatgagcaagtgaactcttgatttgagcttttgcctttgggttgatatagccagtgccctgtgtaagcttaatcaatgcaaatttaatgccggcgtagcttacgttttctgattggtagcttgcgacatcagcacccaaacttctttttgatacggttaagtttgacatctttttcaccgcctttcatttggtttcttttggcaatcgtttggttttcaaacgattttccaaaagattcaaaaacgtactcgttgtacgtcttatatctagtctttgtcatcagaatcatcaccgcttacaaaaccaattggttgagcattgtcatcttcatcttgtgtagccttttcttgatcagcttgcatttggtcatatgcgtgttggacagctcccttagctacggattcggtaaggggcttgttttccttttgtgcttggttcagcaaagcttcaaccgccttagctttcttttcagcacctgaaatgtcgagcgtagcggcttcacttactacgaacttggcaatctggtcaatggtcataacttcctttggtaaaggcttctttgacttagacgcaaagaaatcaataccagtagaaacaccttgacatacagcgacaaaggcaagaaatcccacaaaaagatattcattaagttggcttaaattcattagtcagtcaccttcttagttaaaaaagaagtagtatctggcttattttctacttgtggtgctggtgtagtgctttcaggatccttaaccattgaatcatccttaattcctgcaaagtagcgaacccacttagtaacctctgccttgatgtcttgtggtgcatcgtcaacggtcaaaacgccgtcttgtaccaaggtaacgtaatctaaaattctagtgtttggcttcattttcacttaactcctttctgagtttttcattttcattgagtagttttttgttttccgcgtttaaacgcttattctgttcaacaatgtaatctcggttattctccacgctatccatatcacttttcttaccgttttgcttaaaggtaaagtagcctaaaagcaaagcggacaaagccgatataatgctgtttaggtcgacatgcactatatcacccctaacgctttgaataatgccttgctgtccagataataaaggctataaccgccgtatttgacaaagcgttctggacaaactccatttcatgggcaaaaatcacgtgttcaatttcgattgatgaaattattgctagcagcaccacgacaagtgccaacaacacccctagaagcttattgttgttgtaccgtgaacaggtgtaaaccagcaacgcaatgcctacaatcatcattgaacaatctaagtaaacgttgttcatcatccacgctagttgtggtggataaaagaaaaatctgcggttaaggtaaaagcccaaacctttaccgaaaatcagcagactaatgatcacgtaaagtgagttattgttgaggcgttgcagtagctggcgcataagcttcgcctacaatcttttggtaattttcaactgataagaaaccttgtactactaggtccttcatgccgttcttatcatagatgccgaattcccagtccatacgatacatttctaaaaagtttgcttgaatttgttccattaaagtcatgatttatgtcctccttaactattgcttatcagttgttgggttagctggtgtagcgttattagcatttgcgccaactgccttggttaccattgctaaggtcttttgcatagcaccaagaatttgattagtgttttgagtttgttcagtaaagctcttcatcaaagctaagttttgcttagatgattgagcttgaacttcttgcatatctcttaatgcttggtctaccttatcgttggctttgtcgagttcagcactcttcttgtccaattcagccagcttttgtgtagtttcttgcaagataacggcttgattgtccttgtcgttctcgctccaatcagtggcgcccactgtccaaactgggtctttaaagctgtcagatggtctttcggcgtggacttgccatgggagcgccacacttgcttcatcgccaaaaactgggattactttgtgatgccaaacaggatccgcattgtcaggatctgacaagtagacaaagcctgtaagagttgggaactttgcctttaatgcctgttcttgttcagcaacactgttttgatcttgtgtagcgtttgtttcggcgcccgctactggtgcaacttgtgtattttcgtcagccattttattggctcctttctatataaaaagcccacgggaacgccccgtgagcaaggttgttttttgtataaaaaaagcactcaatgagtgctataaatcctctctcaacaaatatctattcataatatccgttgcttttatgtaagttctatatattccatcatcagttcccatattattaatccaatggctaaaataaacactgtaataaggaatattttggctacttaaaataattccagtaatagtccccgttgaggccaaattcaatataccagaaggtatatcgaaattatgtagcttactatctgaaatttgtacatcataaccagtaggatcaacccatgctacctgatatttttgacgagtaacagttttaccgattaatttcaaatttacataatcatcaagtaataattgttgtagataatatttttcacgatttaaaagaagatgatcaatcatagagccacctccctaagcaggtaaagaagtgatctaagtcgttgatacaaacgaataggaaggaatttaccccccccaatttacggattcaacgtcacttgctgaaacgcaagacaaatatattggaaatgtgtctggcaaatcttcccattgcccattacgatttgcagttccagttattgcatagtaattgttagccgtgccaacacatctaaaggtagatctaccaattgaaatagcacttccattagcgccccctattactccgccttgtcttacggtcacagttgctggatgtgggctccatgttttaccattggcaacaattgaagtatcactatccgaaatttcaaaccacttttttgtattcaaaattagatggtctagcatgctttcaccttctttctattacttttcaatcatagccaaccgtgtaggcttctcattttcccaggcttgggcttgggcttcttgacttgctgggaagcgacgaccctctacgtagttgtccttaatgtaagttacattgttgattaaatcgttaatctgcttttgcttgttaacattgtcttcctttaaatcgttgatctgtctttgcaaatcgttgatcgttggactggaaatattaccgctagcatcaacgcgagctgcctgtgcgccagtgctattgcgaattacaacggcattagagttatcgtcccccagctggataaccaggtctaagttgtcgttagcatcgttatctgcaaacagtctgacattatcagtagcgccactccatgttaacccgccaatgttaccgtcatgcgattcaactgcgcccgcgccattccagttgatagtactatgttccgccatgtctccaccagagttggacagtttgccgtttaattgtcccttggtccagttaacaatgtcttgacctgcattctgatccatcagaatctgattgccgccgtgtaggttttcttccgtcatcttagttgtagcgtttgcgttagcatcaaaaccacgggcaacggttgaggtaacgtttacgttgccgcttccgtcaggggttaagccattaacctttttcacaaattgaccgacattcaagccatcgaccttggatttgatcatgttagtaatgtcatcgttagacaacgtattacttggtgtaatgcgtgtccaggggaaccaggctttggtatctccacgcatcccacgtgcaaaaataaccccactcatggcagaaactaaaatttgaatgatagtattagttttaccaacgtcattaattacttttaagaagctgttttgcaaaaataaggaggccaactgtggtctattagcaaaggtattcgcattcttcggcatgcgatataaaccggactcagtcagattgtttaaatctgtcactcctgctggaatgtccttaatgcggtcactgtcaacgatcaagtcaagaatgccgtccttgtcgggttcaacaaccgctccgtcgttgatctttgcacccttaaccttgcccgcttctgcaatttttgggtcatactccgctttaagcttcaaaatagctgcgtctaaatcttcatcataaactacgccaatttgctttacactgatgttaattttggcagctgcgccgagtttaaacgcaacgccaagcttgattagctgtgttgatgtgtgatctggcgaacctgctccaagtgttgcagtaccaatagctggaataattgcgactaaaatttcttctttgccgccatcaatggttgcgtaaagcccaatcgacttaaaattgatatcctcatttaaatcgtgatttgaaaatgcaaattcgatgtctacttgtttagtttctttatcaaccggtgagatgtcagccaccttaatgccggttgtcatcttttcgccagctaaagaggtcaaagccctaatttgttcatcggtcattccgcttaaatcttgcgtataaagtgcggctttggtataaaggatttcgcctttacccgatccgagttttgaaaacaaattacgccctatatctgtaactagcgcctgattcatttttttactagtcgttgtatccatagtttcctttctaattagctatcattttgtaagaaacgataaccaatggttttgcaccaatgtaagattcacatggttgttggtcttgccaacctgtccaccacgtagttgttacctgatgcatatttacgtcttccgctgttacagcggtagcaatatattctgtgttctgttgcgactcttcccagccagtccaccagctggaaccaacatcaatgtttaaatccgtttcatcaattgaagcggcaccaatgtactcggtagttgtaacatttacataaaaaacaatctcatcaatccagtaacccattgccaatagattttgaatgttctttatgataaatttttgcatttgaagtgtttgcacattgtcccacggtatttcgataccaacatgacgaaggccggttttatagactttaaattgttccggctttgcatctagggcagttcccagaattttaaccattgatggtattgtgccttgagccctagaaattaaaatgtgtaaaaaaatgatgaaacggaatgtttacatcatcatcactaattctataagctttgtaatcttgcccgattaaatcaagtgttgtgccttttgccttgtcaatgcttcgccagtctgcaattttttcgttttcatcactgatcttttcaagcagtgaattataactgtctagcagctggtaaaaaacggtatcttttttcttgttccagtggtcggctacttccgcgatcagctgatctgttgtctcataagccaattaaatcaacctccacattttcagggtcacaatgagcaaattcggaacgaccaattaaaatattttggtctgctaatttatctttagtactaccaattacaatggttgcatcatcaacaccgttaacgtcataggtagcagaataaagacgggtaaaattgaccctttgccccatttcaaggaaattaatttcgtcgcaaatagcttgcttgatgtcatcaacccccgcatcactgttccagtcgtcattaattgaaacatcgacctttacgtaaatgttatgttgttgagcgtggttaaatttaacttctttaacctttcctgttgcatctggtgcttctttaacaattgagccagctaaggtgataccggccgcacatttatcaactaaagttttagcgatttcatcatcgttaccacctaaaacataaatgtgaactgaacattcgggattaccgtattcatccgtcttatacttgtcgttgtcaataaagccaacttgcttaacgccgttgaggttcattaatgccgatttaatacctagttctgtaggaccaggacgggcgacattttccataattaaacgttttctaaaggtttcatcgtcttcataatcttgcccgccgcctgcaggctgtgggttggttacagagataaagtcttcatctgggttggcaaacaaagtaattgtgttagctggtacattagtaaattcgccagtttcttcacattcaacgtttccagttccttgaaaagccccgtcgctttgttttgaagtgataacatcttctgttaagtcaaataccaagccgtcttctgtttcgaacttttcgccagcttgaattaaatattcgccttcagtcgttattactacttccgcatgagatggagcgtcaactttacgggtcaaactgatattgcccgctaatcggtctaatgctgaatttacagcggttgaatagaatccagaatagtaaatttgttcctgttgctgaattaaatcataagacgcatcactcattaaacgggcaaaaattcctagataagcattacttgttagtgcaatatcatcccctaatctagttcggtaatcgtcttcaacaccgtctaagatttccgcaaaacttggggcaatataaccggtttcttttaaaccaaaatcagttgtcaacttgtaacccccccttctacttcaccaatatttgcggtggctctaaaattaatctgcatttttctttcaggtttcttgataaattcgatattatcaacggtttcaacttccggtacgtttgcttcaatagccgctcgcatatcattctccgccgcttgcttattgaagtttttacctaaaaagctgctataatccgcgcccatttcagggtctagccgttgcatttcgccatatcgaatttctagcgttgccttaattctttgcgctatttcgtcaagaccgctagtcatttctaaatcgtgagtaatcggatcaataactaggtcatgattatcactcataaataggtccctagccatcgtcgtcacccttataaacagaaacgataattgagtcgtttgcatcatgcatcctgccggtatttggcgtaaaggtgttcccagtgccgtcccagttatcaatgtcacggtccatagcagcggctatcactacagcgccaactctcatagacttctttttcggataatgttctaaaaaatgtgagttaacttctgggctactatcaacggcttttaaatccgacttaaacttatctaacaattcatcaagcctatagcaagattcggcaaccggaacatctaagtactgagccgatttagtgccatcgatccaattcgccagcggttgaatatctgcaatgtgttttttcttgtcgtaagttaaaactttagctaaaaaagcagattcaagacttctgctgaatcggtttttcaccttactaatgttttcataccatcgaattggaaccctatttttttgtttcatactgtcatctcctcgtattatataaattgtaattagtcatattgtgataattaatcaaattagtatttgctttttgatcttcacatgttagcctctaattgtcattggctttggtcaactggtctaggttatcacctcctgcagttttgtctgctttataagtctgccacccagacagttcctttatgctctaactcacatgctgtattgattgcttctttttgctagtccttgagcaattgggattaggtgcagctttcaaagaagcaaccagtgaatacttatactggcgagattgaacttaagaactgtaattaggggttaacatgtgaagatcaaaatctatgatcagaaatttgaaagaaaggaggccatttccaatgaaattatttgtcggtattgatgttagttctaaagatttacaggtcgttgcacttgattcagaagatcaaaacaaacgcttaattaacgatagctttgtcaatgatctttatggtgctagtgaactgaaaaaacaaattttagatctagctcaaaataaacactatgatcaaatcattattggcatggaagctacatctatttacagttttcatcctgcttactttttccaaaatgacgaagatttacaaaagctcaatgtagagactgatgtaattaaccccaaagaaaccagcaggtttcataaagtctttgaagaaagtaaaactgatcctctcgatgcttattacattgctttgtatctaagctttggacattatcgagtaagcattgccagacaagacaactatcttgctttagagcgtttaacgcgtaccagatatgaattagttcaagaactgactcgtaccaaacagcacttcattgaagctttatattatcgggttaataaactaatcactgtcgataaagataagattaatactcctcttttcggtgctacaatgatgtctattgtaaccgatagtaaaactctggatgagatcgcggatatgcctaccgaagacttaatttcttacttacaggttaaaggcagaggacgcttttccgatccagataccttggctaaagcaattaagaaagctgttagaggttcatatcgcttaggcaaagtaatgactgattcaattgatgcagtgctttctgttcattacaacatgattcaaagctttaatgaatctattaaagatctagaaaaagcaattgatcgtatcgttgatgcattaccagaaagcaaaattctggaatcaattcccggtattggcaaaacctatacagctggtattatcgctgagatcggaagtatcgatcgctttgataaagaagaacagctggctaagtatgccggcctaacctggaatcaatatcaatcgggagatcacagcaacgaacatactccaatggccaggactggaaacagatatctaagatattacttgattgaagctgccaatctagcaagattacatgatcctgttttcaaaaaatattaccaaaagaagtatgatgaagctgtctactcgccgcataaacgtgcttgcacattaactgcaagaaaattagtacgagttatctttaaattgctcaaagatgacaaactgtacaggacaccgaggtcttaatttcaaaaattggtctaaatttaaaagtaaacaaaagtttaacattaaaaaaatcaacctttaccaaggcttagtttcatatactcaaatttatgatcaaaaagaacaaatatcatcgcctttcatttgacttattaccacatgacttattttttagatttactttttttcttgcctttacttttagattttgttttatgaccagccttagcttttgtaaccgccgcaatagtgcattgagtttgtggactttcgccatcaaaactatgctgtccatttttaacgacaaattttccttttaagaacttagaattcatgataatgccggtattaacggtaacttctgggactaagggcgtaacaatttgccaagttgtcccgtttttatcatcatcgttttgcgatggaacttgaattaagtctttatcatcaatcacaaaccaagtatttttcttgctattaggattgacaattacgagcttgccacgttcataaaacatttccgattttgctaacttaacaaagtttttaattaaagttagcggcttgcctttagcggtaaaggattttttaattccttcatttttagctaaatcgattttagctattttgataccggcttgttccgctattccttcaattacttgcttataagtcgttccttttcggtaaactcggttagcaaaataagtcttattatcacggcttttaacccttttatttgtagtttttggtttaacccatacttttcgataagcccaatggtggactacatgtttctgcccttttttaggacctctcttgtaagtttcaacgaccgaggtactataacgctgattcttgtaatgacctttttcagtgattttaacggttttgtagtgattaacctttttattcttttttagcttcaactttcgagcagctacattgctgtagtttgtgccttcagtaaaagttaaaactttgctatcagttgtcccatcattacttaatttacccgtattagagataaatccttcagctatttttttagggtctttaccccagttaaaatttatccagcagtgcatcccttttttataaaagtctttatgttgcttggttaaattgaaaatagttgttgtaaaagtagacgggacaggatcattagtaaacgggacttcaaacgtaaaaggataattatgttcgtaagtttcatcgttatatacgatttgcttgtgtcctttactgtcaaccgccacaaattccatatgtggatctttagtaacgatcattagtaagacacctcctcatccgtcaggtcgtcatcattttcgttagggtcgtaacccagcggtttaattgatggatcttctgtttctgatccgtttgggtcaacaacgtcaagatacaagcggacctcatatccaaatgttcccttgccttggtctgttgccttacccgtttcgtccatggttcgaatgtcaattcgtggcaattctggatcaggaatatcaataccaactaattgaccaagcaaaagaggctcctgcgttagaagcctcttattgttatgccaaattgtaattgtgtagtaatccgcaacttcgttgtaatctattctcatatcataggtatcgcccacaagggttatttgaaagatataaggaatatttttaacatcaacatcaagataatttctcatctaaatcaccgcctacgcaacccgtattttattgccagggtagattaagttaggattcttaatgtggttgactcgtgccatccattgaacggaactaccgtatttcttagacaaagcccacaatgtatcaccagatttaatagtgatagctgtgtacttcttatttcggttacctgcgacagatttagaagccttagatgattttctgtgatgcttactatcgtttgaagtggtgatttttgcttgatagacaaactgaaaagtaagtgaaacttcaatgttatctcgaagatttttatagtcgttgttcatgtttgcaattaggtagtgcttgtaacagaaatctccccggtaggttaaccgaatatgggagctattccattgactcagcatgtgccatttgcggtatgaatcggctttatccttgcctacaataatgccagctactgttgcccctttgctgtttacacgggcatatgagctatatggtgcaccttcatcaaccggataagaagtaatgtttgaagaaacattttcactttcaccgtctgccggcgaaatatagataatttcgcctttaccgtctgaacgataaatagcacatttaccctcattcttccagccagtgttgtgctccgcaatttcagccaacttattacttaaatcaattctttgcgtaacaatacggtcgtacttgtctttcgcttttttataattgttttccgcttgctttttccttttgtttgcggcatcaacaagcttcaaacaattatcacgttttcggataagctttttctttttaatttgattcttttcaaaatgtgaatcgaagtcatagccctgcgcctttgaaaacatttttcggtaaacggcgccttcatgtttttgccgcttgtcccagtatttcatagagtcatgggctttttgttcagccgttctcttttttggtttagttgcttgaaccattagcatcaccttcatttctataagaaatcgtcatcatcacccgtatcatcgccaatatgatcaagaataatatttaacttttggcgtacttgttgatctacctctacgcctatcatcttcgctaatttttgcaatttagcatcatcgccatcaacgttgccgttaatatttacggttacttgaatgccacctaaagccccgccagttcctcttactgggcgtacttttggcttagatgaagttagtggctttaatctttgccgcgtcttttcatttgagtagatgtgaaccgaatctttaaattcggcaagctctggaccgtgttcgccaactaaaaccttgtcgccaacgacaggatcgccgcctttagcgtatccaagaactttgcggatctccatggcacctttgacgtgttgagcgttgtagccgccacgttcccattcagatgaaaacttgtttgctaggctggcaacgctaccagttccttccaaaacggagcgaagaatagcgctgtctgagccttcgcctttaacggcaaagcttaattgtgtgccggcgtttttccagcttgtcccgtgatgtctagcataagcaattaagttagacttacgaccgccaagccattgacctaaaccggaagcaccaccgctgctgttaactgcaccggggtttaaaccacctgattcaaaattccagttacccaaaacggctgcaataccattcttggttgctttggggtcaagttgcttcaatccaccggctagggctttagctctttcagctaagtcaccgccaacactaaatgagcctaatgaaccaagatcatcactaagatttttcttgatccaactcaaagcagtattacctaattctttctttgcaagagccatcaagtttttatctgctgttgctgttttcttggcttgactggcgttgtgtaagccacgaacacggtaatagccgtagcccatccccttgtcgtcagcaatcgaagtgacacgagcatgaggcggagtttcattgaacattgttccggtgtgtgggtttttgataattcccacgtgaccagcggcacctgttccatggccaaagataaccaagtcacctggaattgtcttagataacgacttacctaggtattcaacacctgagctgtgttgcattgccacagtcgtgcgtccaatatctacgccaaagtgacgtaaagcttgcatgaccatacccgaacagtcggatagcgtcttgcttgccgcgcccatttggtacttaacgccactgaatgttgattcagcgtactttaaaaatccttcacgggttccgcccttgccattagctccgccaattgcgttgttaatgacggcccacattgcgttagaccatggattacctaacttagttgatgaatttctagctaaattaatagagccttgtcgtaaatctgtaccacttgccttaatttttgaagtgtacatatcagcaaaactcttagcaggattatttccagctgtctcagcgatttttcttagtctgctatgacttacgccagagcctttcgcaaaacgctgtaatccccaataatttgccaattcttgtgtttgagaaccattgaggacagaatcacctttttcaagtggcaatatcctgttattccctcttggaatccaaatatcaccgctatttttgataattgcttcctgtcttggtccaattgtcgcatcattgaccattgccatggtgttttgggacaaacgcccatttgaacctttagcgaacttaactggcttgatgactgacgtgttaccaccaaactgtccaagaacttgatcaattcccttaataccagaattaacctggtcaattgtgtcgcccattgcagaatgagcgtacttggtcatgtgacctagctctttaccaaagccctttgcagtcgtagaagcaagatcaactacaccgtcatgcatcttgtccatttgcttatgaactcctgtccgcatgtgggtgtattcgtctattgccccttttcggctcttctgggcttgttttgtggtagtgcttgtaatcttgcgccagcttgaattgctcttcttagtaagatcattaagtgacttggacgacttagaagcaatctgcttgtagtcatcagtaactttcttggtagttttaccaaggctagcgttgccgttagcatatcccttgagctttaatccagcaccgagaccgccactcataacctttgcggtgtcgcgagcgttgagaattttttcacctgactggatatttgccaattgcggacctttagcgccaagcaaacgagcatggttggaataaggcttgtaagctaattcgggccccgcttcaccaactaatgaagcagtaccgttagcatgagcgcctaagtgagtcgagcggttaatgtcagcaatagtagtagcatgtgacttgctggcgtgatgtttaccaccttgtccgttttgcatggctttaacggatttgttagcacttgcaacactggtgctattttcaggtttctttgtcttccagtctttacctgacacaaaatcccaaacatttttgacactacttgcaataccgccaataactgagctaaacatgtctttaagaccggatagcattccagtaaccatgtcaatagctgattttgcaacgcccttcatgtctttccagactttactccatcttccatggaaaatatcagatattgttctgacaacgccagatgatattttgacaatacccttgatgttagacgttacaattttgacagctccacgaacaacaccgattcccgttttaattaaggtactaccctctttaataacgagttttagtgaagccattaatccagattttaagaagtttttgaagtttctaaagtctttattgcggttaaggtcgcgccagtctcgcccaatgtcacgggtcatgctgccaaatgatctttttacacttttgacagtgccgctgatcattttgcccatacccgcatcgtgccaagtcgtcttaattgaccatacggcttgcttgaacgtcttaccaacggctttaccaaacttggtcttgctaaacctttttgccatatcgccagcccatttaccagctacttgtcctaatgttgagccaatagccgcaccagctggaccaccaaggtaaagcccaacaccgccgccaattgcggaacctatagacttaccataattttcaaacttctttttagggttctttgtggtgatagctttataaagatcaataccagaattaagcgcaacgccagcgccagctagagcagtagcccctgtgcttgcagtaccgcccaatttaccagctactttgctacctaatccagttttcgcaagtttgccaccaattagattagaactgactttacttatagcagaacccactccgcctagaagagacgggttagtcgcttcttcgccagcgccttttgccgctgttttggctacagtcttaccgccaataccaagtacgttaccaactagcctcttagcaacaaagccagtacttaatgccccagtaatagcagtgatataacctaaagtctttttaacaggcgtaggccatcctttgatggcttgcaagaccttgttaactaatctaagcatattagctaaaccgggtgctatttgccgggcaaactgcattccaacttgctttaaaagctgtcgtgtcacttccatttggttttttagtgacttcatatttttattagataagttagtaatgtaatttgtactatcagccctattagcatccttaacgttattagcaatatcacgattatttttagttaaaattagggcgtcgttaaagccagtttgaccgaataactgtttgaaatcgccagtaacacggttagactttttgccctgcgtagctcggttaaggatatcaaagacagtaggcaactgttttaatttgcccgacttagtaaagaaatcagcgggcgataaccctaaatcttttagcgccgcggtctttgttttgctcttcgaagcaccaattaagctcgagacaacttgccttacaccagtaccagcagaggtgccttcttcaccgaagtttgacaaagtaccaagtacagccaatgatgacgaaagtgattgacctgtttggtgaagaattgaaccggacattttaaaagaattaccaaatccgttttcaccaccaactttaccagatgtcatgtcaccgacataagccgctttgtttaaaacttcccgtgtgtaacgtgccatcttcttagtactgttaccagctcgctttttatagccaaactgttcaagcataggagcggcggcattaacaatttgatcataatgctcattagtcgctttagcagcttgtacgaaatacttgtgtgcggctaaatcttgttttccggaataaccacgcctaattagctcttctgacccctttgccaactcagtttgatcaacgccatattttgtagataaatcagcattttcacgtctaatagccgccgtatttttcttagcagtagcggcactatctccaccagtttgctgcaggttcttaataacgttgtattcgtcagctagcttagtggcttcatcatttgcattcttaaaagccgctgcaactgggaccattgccgccgcaatgcctgttccaacggtaattaattttgaacccgcatcatgaagcaaattaaagcccgtagttgcacggtcgctggctgatctgttgttttttagcgtcccatttgtcttctcaacagcatcttttgccgtattaaagccatttgaagcagtcttagcagaatcgccagctttccagattgtgttggataaaccgcccattgttttagcggaatcaccgacaccagcaattgaagactttaattttacgtttgcatcaattaatcgatcagttgaagtttttgtttcttctaaatgctttttgacttcgctggtggtttgaccactagtggttgccatgccgcctagttgcttttttaagccagcaactgtacgacttgtctcttcaacggaatttctgtttctgttgaattgttcggtaaagtcaggagcctttaaacgatcaaagcgtttttctaaaacaccgaggtcggaaataaactttctagttgtttgctctgcttcttttagcgaattgtattcaacgtttgtattaattccaattcctagatgttcgatatcagccacgttttcagctcctttctttaaaattcaggcaaaataaaaacccatcaatttaattgacaggcatcacctctatttatcaccaccgccaaacaattcaccgatatgatttgcttgactaatacttgttgtttctatgtcccgttctactacctttgccataatcaataattgatctggtgtagcattttttacaagccgttcaggaatcccgtgcattatcaaacgcagagggagttcaacataatcggcttgtctttcaatttctctattacctagtttctgtctagagtttttcagtaagaaaattcaaaacagcttcggcggcttcataaagaccttcatgatcgttccaccacttaattgacttaatctttggttggataatcacgtgcttcaagctttctctcagcaattccggacgattaattgcaccgaacgggttacgggaattttccagaatttcagttgcttcttcaactccagggaattgaagctttaattgatattcttggtcagtatcttcccgaatggttacggtcttagaaagagcagtcaaaggtgtaaccttgcttgattccgcttcttccttaatcttcatttgttcttcgtgcgccttttcggcaagctttgcgttattgatttcttcactcattattaagtctcctttaagttaatttgatttcatgaaagtctcttgaaaccttcgaattaatcgatataggtcatgttcgaagtttcttctttgttaagcattgtaataggccagttacggtcaccggcttgtgcgccgccttgcttatctgggatcttgtcaattgatgcataatgacaagaaatatgtgatgttgagtcaatgatgtcaactgtaaaaaattcatccttgttaaacaagtctaaaagataggcattgcaaggagatgtttcatctaatggcaatgtaaatcccgccatagtcttgttattgtgcgatttagtagctgatccttgtggatcaatcttgtacgtattcgcattatttttatcagtaaccgtaaacatgctgttttctgaaaatccatacatcaatttgtcattgatcataatggtgcagtcattggcatcatattcacgcattttagatgttttaatctttgaaggcatttaaactcccctttctaattaagcagccatgatagtgtctgaatcgacaacgccattaacggtaatagtatgaatagcgcttgaagcatggtattcaaagctagcgccgtcatagaatctgtctgacaagtgttggcgtgattgctgactacgtggagtggtagtaacgctgaacattgggcgaccagtagtgtcgtcagtcatgatgatgcccttgtcgtacgcttcattcaaaacttgtgttaagactgcacgaatcatggcaatgccttgagcttcatatggaatcttgccgttatcttgcaaaagcttctgcaagcggctttgacattcggtttgaacccacatcacaccgtgaagcaagtcaatatattcacctgataaggtagttccctctgaggtttgacctttgcccatcatttcttcataggcaatagcatgaatattgttaataccagccaattcttgactagttaagttttcaggcgtaatgccttcaagttgcttaaacttccaagtaattgagccaacatcgttaagagcaatgccaccgacaaaagcggcgtccattggctcattcaaatcgtgcttcaagccgatagtgtagttttgccccatcatttgggtaaacttggacaaatcttcagtttggagaactaagaagtgatctttgtttacttcaaagatgtttgacaattgaacggttgaatcgtcaattgtgttgtctacacatacgccaaaagtccagttgaagtaccagaaagccttcaaactatcgtaagcctttgacttgtcataatctaagacggctaagcggtctgagtgctttggctgagcaaagtaggctgtagcctttttgtaaacagccgaatcttctttgtagtcaactgccaccgcatcaaggttcttatattcacggtaaattgccccagtagctgggtcagtcttacgtaaaagcaaaccattcaagcggtcggtgtttgacaaagtatctggcaaagtttgagctggtgtcttttgtgcggcacccttgtcgtctttgccagctgaatcactgttagcagctgcagtagtagcatttaacagcaaaatattacctagccccttaattggttggggatgtaggacagtcataatgacgttcacatccatagggcggtcgtaaggggcgaccgtggttaatgttggcattaaagttcttcctttcttacgtttatttcttttcctgtcatttgattcatagccttaattgattcaatcgttgtttcattaaattcaaagttaaggtcttccggtttatagatagttccagcacggtaaatagaaaacgagcaatcgaaaccaaatctataaacgggtaattgcgtgccattatagaaatttcgagagcttgttcctgatacgttatgtggaatcacatgtgcttgtttaaaaaatcctctatatccgtaactgtgcgctaatgtcttgcgtaaatcattggccgtattcaaagcttcatacatgtcggttgcttgcacatcaatttgaagtcttacttccatgacatcagtttcgtctaaagtaacgtcacttccagggtctacccagtcataagtaataaacgggtaattgctacgcaaaccggcattcatttgcggatatacaccgcaatgatatttttgattaactacctggataagttggtatatcactaggtagttgtccatcattggtggcatttgggtttgtgtcatcctgatttactcccttcaattggtactcaaaaaagtgtggattcgtataaccttcataagatgatcgactagtaactttgtagtagccgccttgtgtcggaacattgaccacactttcaattggatatttattaattgataaccaaagtaaatcgccttgcacttctccgccgccgtctaactgggcgaagagttgtgcaaggtgacttgacattggtaaaactggctcatgaagcttttcagcatcatcatcgcttaattgggaataatcaggggcatcagtaggtgcgccacgatagcggggtttatagaattgccccgaactccaaactttaatgtctacaccgtacttgtgaatcattcttgccggattcattttgtgcattagatcaaacccccctttctaaatcgaaactatcatgaactttacttgtctttgaagctcacccgtatcgaccaacggattgtctgagcctttacgctcgatagtcgctggtcggttctttgggtgcttcaacttaattgatgacatagcgatgtcggcagtacatgcaacgcctagccggctaagtagctgcttacccgttgcttcacctgctagaacttttgcaatatatctccgcactaattgtgtgtacttccttttgttagctaaataagcctgccgaataaacgggcgggctggtatttgaacaagcttactaagatagaaatatgccactaacttgccgtgatcgttaacgcatgctactcggtgccctttaggaataaacaagccttcaatatctttcgggccttttcctttaggacagtctttagtaggaatccatagccactcgccatttttaggcttgattgtggctccaaattcgttagccccaacgattgttagtaatctactttcacgttttccaaaaaaaccaattacaacctgatgcgtttttaagtagtcaagttccttagttacttctggaatacggttataaccttcaattttcatcagtgttcgattattctaatttttacgggattgccgacataatcttggtacagcctccaatagagctgtccccatggagagcgttgtaaccacttcaagcggctggtatcagcataatggttttcaagaacgtcaactttttcgaaagtcattccgctacctgctccgtcctgggttgctaaaagatgtaaagtcatagcacgggtagccaactcaagggctggcatttcggcgccatgaggctttttaactttagggaacccgtcagaaacggcaatcattcgggcattttcaattaatgcttcaagcgattcatcgggtacgtcatcggtcatgcccgcagtatcaagctttttaattaactctactgtggtagttgtgtcattcatactacttagcctttgtcttagcttctgcccatgtttcagaaccatcattcaagccggttaactgaacaattgcggctgggaacttaactgacaagccgcctgaacgttccatgtacatttgtttgtagcttaatccgttgtcagctgatggaatggctgtgccgtaacggcgtggttccattgcaataacaatttgtgcaacatcaggagtatcaaggtaaacaatacccatattctttttacctgcttgtccctttccattgttccaatacttagcttcaagctcggtaacaggtttaattccagcaaatacaccatcgctgttagccccgttacgttgaatcatgttccataaagtcttgtctggattgtattggttaaccaacggacgggttaataattcgtactcctttggtggcaaagctaagtaaggcttaacgttgtggtagccaggcaacaaagtaatctttgaagcggcatccataaagtaattgataatcttgtaagcatcactaaatgcgtccttgttgttaggatctactaccttttgcaaggttacgcttggatcatctaaagtttgataacctgcggtttcagcattagtagttaaaccgtaaataggtctttgtgagtcgccattaccgttgaaaattaaagcgtcttcccaatttgctaacgcgtcatgagtagcggttgcacggtcggtaataatatcgatatttctaccgccggtgtgtgaacgctctaaatcagcttgtgaatattcgaatccagctgccttctccgcaacatagcctacttccctgtggtaagttacatcagtggtagtgatgtctgttgcacggtcggtgtagtctgatgcttggcccataatttctttccatgcccattcgtaagtaagtgcccatggatcgggaagcggttttagctggaacattgttctgccttgaagttcttctcgttttggttgtaaaacaaccggatcaacaacgttgaaaagttcactataggcagttcccgtattaaatcctgcttttggcattatttatcccccttcttatcggtaccggtagttgatgatgtgccggctgattgattagtagtacttggatcagttgttggtgttgatggcttgtctaccgtggcgcctgtgccagtagtacccatgtcagttaagttgacatctacgattgcggtaccattagcatcgcctgcagtgataaagcgaccaacaacgggctcacctggcttagctggtctaaaagtaccatcagcattaatagttgcttgatctaagcggtcaacgtcttcagtaattggaactgacacgctaccacggcgtaaagcgccaatcttttcacctttaagccagtggtcattttcgatgtcatcgtaactatgaccaattacgtaagcgcgcttaaccgaaattgcatagataggtgccttagttgctactacggcttgattgtcttgaatatcaagggcaacaccataatcgatattagtagcagcggtaacggtataaattgaataatcttttaaagaaccgatagttccgttacctaattctttcttttgataaagttgtccaactggtaatggcattattcgttacctccttcgtataagttttgacgtgcttcaagtgctttctctacggcagtcttttcgttcgaatcgccagcagtacggccataacttacgccaccagcattagtactaaataggccttcataaagaccacttacaaagtcgtcacttttatctgaataatcgtgttcgcctaaatttttattaagagcggcttcttcgacttcacgttcgctcttaccggcaaagtcatagctgtcaccaacaactttcttagctctttcacggaatgctaaggtcttgttgattctgtcttcgaatgcatcccctgcaagttgtgacttgagtttcttattttcttcttctgcgctgtcggcgcgtgagttagcttcatcagccttcttcttagcgtcggcggcttcctttttgttcttatcgccagagccttgtaactccttaatttgggaattaagtttgtcacgctccgcaataagcttttctaatttgctgttgctgtcgtcagcgtcaccaacaagcttcgttaacttgtcggcatcttcaacagcaacgctaatatcaccttgcttggtatgtacttttgtaaagtccatcttttcacctttctttttttcgttatcttcaggaatttcttctgcactatcagccgttagccttaccgagtgaccagcgcgaccacggtctacaatcgcaacatgattaattctgatattggtttgcttagcatcgtaggcttgcccattaagttcacctttagttggatcaagctgcatttgaaaaccaattgataattcttgcttgccgtgcctgattttgttgattaagtcactatcagttatggtcaaatcatttctgatagtcttggttgctttatcaacacgggcatgatcggacataaagcccttcataaatcgctgggaattatcacagttaaccatgattgtgttgccgtttgcgtcggttgggtggtcgtcagtaactggtttgttattggctgaatcaaccgtagcagctgagaacaattcctctggtgtcttagcttcttgaattcgttgcccatcgaattgacggtatggtcgtacgccctcacatgtgattggcacattcttgacgtgcagaaaccccgttattggatcgatagtaaatttatcgattggcgtagtagtttcatacctaattgcgcccataagctatgcaccgtaaggaacttcaaccggtttgttaggaatgtaaattgtttgaccttctttaaccttcatcgttgctttgttgatgtggttgaagtatctaagttgctgtaaagctacagagaacttttgagcgacatcaaacaaactttcatctttaccaatcacgtaaggcttagcgtcagaccaatcaaacattcctttagggtcctttgctggttcaaccggcttcataaccggtgaactggttggcttatcaataaccggcttggtagcactatttaaaagtgaacccgttaagggcttgcttgtactacctgctggtgtacttgttggtgtattatctgccatatttctggctcctttctgcataaaaaaagcacccttcatgagtgctaatcatctattactggcatcgcaacacaacggcaattaatcggctcacctggaagctgtccatcgtcaccgccatctggatcatcgtatctaaaaacttgttgatctagtatttggtgtttaggtctaacccgtccatcctccatggattgccatagatatttttcaaagcccgcatgtgtggcgcggtatttattcaactcggctaaaatactgcctgtttgatcgttagcaattagccgagcatggttatatgacatattcgtacgcttaacaattgcgttggttaattccgtggcacccttaccatcactaattgcgcggtaaatgtcgctttgcaattgggcgacgtacttatcccgcatcgaagtgatataagcggtgttctccttaatctttgctttgataaacgcttgaatagtcggattgctttcaattgcttgtgatgaaattgccctagcttgcgcattgacattgctataagaaaaactatttactgacagtacaaattgagttgcaacattttcaagttcctgtttactattagaattctttatagccaatatcatcaacgcaatcaaagcggacaaccgctctattttgtgagggtcattttcatcatcatctgaatcaatcgacaacgctccgcctaacatgtaattcttcaaataataatcggagtaccattgcgctgtttttttccatgacaagacaagacgctttaaagcccccagatacgatttttccaagttcatggggtatcttgtctttggaattgttttacgtcttcttgccatggtcttttgctcctgtgagatgtttttcaatcttagccttttctttggcaaaagattttctatcttggtcggtaatgtcatcatcggcactatcgccagttaactgaattggaatcgcttcgttagtagtttgttgaagcaaaatatcgtgggcttcatcagtagtaagaaagccaccattaattgctgtggataacgctgtggaaagcttaccgagattatcgatcttttcactgtcggttagtctccgcaaaggatagaactcaatgtgccaatctagtgagtccggatcttctgaaccgccgcccacattttcggaccacatcagcaatttaaccaaccattcaagttgtggcttgattacctgctcttgaagagaactgatactgtcgtagtagttaactacgtcctgtgaagcgccagccaatgtaccggcctgttcacccatcaaaatcgatttaggaatcccagttgcggtactaagttgttgccaagcaaaactaaatagtgaatcaatgccgcccggcttatttgaaactttttctaggtcgtcgtcatgtccaacaactaccaacgattcggtgctcataccgcgactcattctgtgatcagttttgcgccggtcatcctcagacagatcaaaataggcgtcgtttttccaaactttcatgttgtactcgtaaagcatcttaccggttgagtacaaaccagtatcaagggttttaatctggtcgtagcaccgcattagcaaagatgcacccgttgcatcgtcttccatcttgtccagcgaaatgtgtctatagcggctactgtcaattgtgatactttcaggctcttttgaattatcatctgaaccatcggataagccgtcaagcaccagcttttcctctttgccaaagttttctagcgttgggtcgttacaaatctggttagctttgacatgcatttgactaaaagcattgattgaattgacttttaaaatgttgtgtgggtctaacggctgttctaagctagttcggtgtttttcatcaacattgacgtttaaatacgcatctccaatgatatttctataaataatttcactagcaatcttttctttaggcaataatgcatctaaagctgtttgatagactacttgtttttcgtcgttgttattaatcactatccgccagccgtttcgagttgctgtttcagctggtaaacgggcgattcggttagctaaagcattagacttaaacagatggtcagcttgtttatagttgtattttctatctaaataccttgttgaaataaaagaagacgtatcaccgaatctgctgggtgttacgcctttactttcataatccataaagtcagcgccaattgtaatttgtgctggctttttctttttgccaaaaccaaacaattaatgacctcctttctaaataaagccgagtgatattttccgcttgtttctcattaggtacttaattgcataagtagcagagtcaacttggtcatcgtgcggcatgttagggaacccacaccattcctcaatcaattcttctgattcgggtttccatttagggtgcggtatgtatacctgacctgcttcaaaatacggtgacacagaagcaaaacgtgcttctttgctgtcggcacctggcgatactggcataattcccggtattttcttcttcaaagtatcaagaattgcgggaccgtttgccttgtcttcaaccaactttgatgttgattccgggtaaatggttgattggtacttaatagcgtctagcgtttgtgtaaagcttaaccgcttgtggcaccagcctggacgtaaaaacacctctgcatcacgtcttgaccatgtttgacctgctacgtagtcgtcattttctttagatttaaacgttgcatcccatgcttggacagtttggtgcaagtgtcgtggtaagatggtggcttctttatcagttaaatgaagtctttgctgagtctcacggtcagggacatagaacttgatccactcacgcttaatgattttaccttcttgtactgtaggtgcttgctggtacaaggcattgaaacgttgagtgccgatatttcgcttttgaattaatagctgatttagtgggtgcagttctggattgagtgcttccccgttgtgtctcccaatttcatcagttttactagcaggaatatcagtagcaatagcagggaacttaatctcttcccagttaaacttttcattttcggatgctgtcttatcattatcaagtaacctaccagctaggtcgtcagtctgccaacgcgtcataatcacaatcactgatgcattcttttgcaaacgagtactaaatgttgaagtccattcaccccaaacattatctctgatcgtttttgacgcagcttccttttcatccttgatagggtcatcaatgattagcaagttagctggtctaccagtaccaccaccaagaattgaagtgtagtaagcttcaccataatgccctgcgacatcgtattcctgtgagttagctaagcctaaattaagaccaaataaacggggtgcccactcgcgaaagtgctgtttaccacgtttgctaaatctcttgtacatagtttcagcataagacgtaaccataattgattgatcagggtgacgcattaagtaatagcttggaaatgtctcggttaccagcattgacttaccatgttgtggtggcattgaaattatgaggttgtgttgttcaccgtctacgatcttttgcaaacgatcacaaacatatttagtgtaattaaacagttttgcctgcttgtcttggttcgcaagcaaaaaataataagcatagctcctacgcgctaattcttctctagcagcaagggctacgcctgctttttgttcatcagtcaattgcactaaaatcaactccttcatctaaggtagcaagtttttcaagagtcttggtatcaagcttagacatgctgtcctttgctttacttgcggtagtatctatctgctctaattgcttttctaacaacttaacctgtaacttagcctgtttagccttagcacgattaagagcagttcttgcagcttgatcttttaacttagcttgctgttccaagtagtaagcacttgtacttgtgtctttttcattgatgatctttaaagcaatgttaacttttgccctactctcaagttcatttttccacttagcaaacttcgttaaataatcaggatgtcttttgcagtaatttcgccacgtatttggagtgatttctatttgttcgcaagcttttttaagcgtacagccagcaacaatgaataacttgaattgtgctaacttttcaggtgtcattttttcaggtctaccagttgtatcttttttagctttttccaaacaaaaatcatctcctttttgagcaaaataaaagaactagtttttaactagttcctacgattatctctgtatttttaattaaagtgtgcttgcatgtaacatttgtcttgcttcttttaagccaacgtcacaattcttaatttggtcaatccagtcattaaacatattagcttttaaatagttgaaatgtaattttgcataagctgctttagtttcaagttcatcaataatagttctaagttcttggtgttctgatttagtcattttaaatacctcttgctttctctttacactgtaatgatagctctgacagcgtataaatccagcaatgttggcattattcttgaattaattcagctttttcacctgtaaatgattcccagcgatcaataattacatcaacatacttaggatcaaattccatagtgtaacaagaacggttattttgctcacaagccataatacttgtacctgatccaccgaatagatctaatacaatatcaccagccttgctactatttttaatttgataatcaaatagtggaataggcttcatagttggatgaagatcacttctttttggcttatcaaaatgcaaaacggttgtttgctttctgtctgagtaccaagcatgcgatccattttcgttccagccatacaagcaaggctcgtgtttccattgatagtcttggcgaccaagcactatttgattcttttcccagattaattcttctctaacttttaaaccactattgtttaaagcaagattaaaattagcagcttctgctgatgcataccaaacataataagcggcaccagctttcatattttcctttgcacaattgaatgctgaataaaggaagttgtaaaatcttctttgtctaaatgatcatttaaaattttcatttgacttttttgcccacctgtatagtccacattataaggtggatcagtcaactaggaggttcagccttgtaccccccccataagcgtttttacatcatcgatcttagtgctgtctccacacattaaacgatgtcgtcctaacttataaatttgacctgccttactttttggctcttttggtggatctttatcaaattcatcatcatgtgcctcgctattttcttcctcaattgtttctaaaggcggaaaaccgaagttagacatatcaatgtcatcaatactacccaattcatcttcaagtagttcatcattccatgtagcaagttcaccagatttattatcagctaatctgtatgctttaacttgttcttccgttaaatccttagcaaccacaacaggcacagtttttaaacctaattttttagcggctttatagcgcgtatgacctgctatgattaccccaccgatgtcaaccacaataggttgttgccaaccgaattctttaattgagttagctacagcatcaacggcatcatcgttgtcacgtggattattttcataaggcttaatttcaccaattgatttagcttctactttcattttccttctccttgattgtacggctaattctcaattctaatgcgaaactataattttccattgcatctaattgtttttccatcagtcttctgttgtaaggaataattgccgaatcatcagagccaattttagaaattgcatcttgcaatctacagattttgtaatctaaggcatccttttcatcttttaaatcaataatcagcttttttaaaagttccttatccctaaacttctttgattctgggattatttgaccgctagggtccatgcgaatacacatttttattaactcagctcctattaaactctcttttcttttgtcggaacaaattgcaaatattcatcggctataaaatcatcatctttagcctttcttatcgaacctatccaagtattcttgtggcataaagcctgtttcttgcttaaatagaatcttttgcttgatattggcaaccgtatttgttttgcagtgcttaacaatctttcttgccttaactaaacggctatgtctttgacataactcaaagtactgtgtagggatcattagtacaggtcatccagattacttgggtcaaacgcaccaggaactttcttatctagttcttccttggcttgttcgcctacgtctttaaagtgctttgccagcttgtcttcaagtttcttatcaaacttagcatcctttgcggcttctacttgctttgctacctgtaaaatagtgtccttgtaaactacgccaatgactacaccagcggcaaaagttaaaattttgttcataatttttcctcctaaaaacaaaaagcaatagcttagcagctactgcaattaacgtgatcctgaattttttggattctagtagcccatcatcgctgactacaacgagtaatgttggattcgaaccaacacgggtgcacttcgtaaccaattcaattgaatgtgttgtgaaataagttgcttattttacgcaccagattactcaacgggcaccgcaggtattgaacctatgctactcacctaaattcttggaggaatctaaattaataacaagtatcaacttaacggtgagcagactacctatctgcccataaaaggcaagcctcttcaaacttgccttcgagcttatcaggactagaacaatgtttaataagctcagaccgctcggtggatttacacgtcttcgcagactacacaagccgaaggattcgaaccttcataaccagttttggagactggcgtgttgccgttacactaggcttgtaggagatagggttgcaccttttgcacaacccatatttatagtaaaaacaagagtttattaatgactcgtaataattgactaacaagttaaattaacgagcaacatcgaaagatcagatctctttcctaatctttcgactctactaatataacccgctttaatggtcaagtgttggtcaaaaatgcgtcaaaaattggcgtttttcggtcaaaagttggtcatttatcggtcaaaaattggcgtttattggtcaaaaataggtcatccatgcaccattaacacgggaattagcctttcagcattgtacttcttgcggtaccgctctaggtgttgagcgaatatataaagtgcttcgtcccttttacgtccgtacgttcttggagaataattcatatcgttataaatccattgtgcaaaatcgtttttaacgtatcttctaaccaaaattttgcggtacggatcccgttcggtatcaggacaactgttcatagcttcaaccacagcacgggcagcattttcacagtccttaacaattgcatcgtacttgtcttgttgctcgatagcttttaaaaattgatcgggctgatggtttacattaccgccgccgtgaacacccgtagggtcgagaagtggactagataagtaagttaccggcagacctgaataattcataatgtctggaaaatcattttcaagaaaattctttgccttgctaatcgttttttctttatcaaaattcaagtctgctaaactcacaatcttcactcccatgaaaccagccgcgctggcgaaacttctaatacttctgctaacttttctactcgactaagagacggctcccgttgttgcttgacgtaccattctaaagatctctcactaattccactcaatcgtgataaatcctttagagtgatgtttttagcagcacaagcttctttaatctttaaaaacgccattaccaggcttcccgtgagtctggaactaataccaatattgaccaacatactagaactggcaagattataaatactattccaagaaacgcattaaaccagttacaatgcggcatccatagaataaataggttgctaataacgccaaaacagataattccaaatgattgagctagctttaaattccaagtttttcttttacttgctagaactataccaaggctaaaagctgttaagccacaagcatatatagcaactaccagcataattaatttaaaatacattgtttcccctattctcttcatacttccttgtaatctggataaccatagccgattaagccttcattgacgatctttacagcgtcctcaaccgatctagctataccgtggattacatgcttatgcattaaatcaagatggtacatttgttgcatttgactaattcgtccttttggcgccttaacttcaataaaaaatacttgcttatcttttaaacggtacccgattaagtcaggagttccaggcttaaccccctgaaaagatgaccattccttgtaggaatagcaccagcatttagcctaatgacagcgcatcgccgccaatttaaggtggcaataattgcgttttgaatcctatgttcgggacctggttcccgtctcacccttctaactcgttgcatcctttactcctgcgttttcaaaatgatttttaaagcatcctcgcttacgtgatgagttgcatggttgccataactgacaaaatgcaaatttaagtcatgtcccatcacataagttttaaagccgtctgtgattgtttctcctacttcaatgtctaacatcaattcacctcttatcaaatttttaagctagtttgtgcgttggaattttgaatttcacgttgaaggacaaaatcaggataccaattgtgagtaaattccatagctttttcaaagtattgcttttctaaactgtcataccttggaatttgaaactcttttttgaaatctctaccaaacgcattaaatacttttctagccttagtttctttgtaataattgctatttacaccgccaatggcttcaattaccttcttttttcttgcttgaagcagctggtagcgttgaacttcacttaattcacttgttttctcaatatggtcaacacgggcttcaaccttgcccattctcttaacaaggcgattagcaaccaccatagttagttgtaattgctcttccggcgtttgcggtaagttgtcttcatttctaattaattcgtccattcgattaaaggcttcaatgtattcaagcttgaacttcattgcatccctgccggtaaagcccattgcaagcaaggtgaacccgtcacggttcatgtagtacattggctgttcttgcccccgatcattaacataagtgctttcagcaaacatctttttcactgctgaattttcagcagtgagatttctaatactttgaagcacatttttatgctctttactaaaagtagcagctactttcaagctagttgtcaaagccttctggcttttcatgattactaagtcattcaccttgtgacgctcctttcataaactcagccatttttttaccgtcttcaaacgcttgttcagctctcccctcagcgtaaccggcgttgtaattattagtacctacctctttaaccaatcgagctaaaatcttagcctgattgtgattagttactaacttttcttgatcgattaagtcatagccctcagaagtaataagaccgctaatattttggacagctaagatattttttaagtaagttactgattcactagtcatttttttattgctcctttagttgcctcaaattccatgaaaagcctgaaatagcctccatagccttggccattttctccacttttaaataaacgctataaatagccatgttatcctcgccatataattcatataagcgaactgcacaaagataaatgtaaatcctatcccctttaattttcacattaaagtcgccatcaatttctttcaaatccttatctagctggtcaaccaactctttacgtctttcttcaaaagttggtttgtaaggtaccgtagtgatcacgatacgctttataggatgcaccaaacccggtaatttcgtagaataatccatgaagttaggctcaccctcaacatcgccaacatccctgccaaaatactcttttagtgcttctgttagtttcttttctttatcgttcatttctaaacctcctaaaaatattgcagtccatccgtaactgtaaatttggtgttttcatcaagctttcgcccgcaattaaatgctttactggataaggtaccccatcagctatcaaataccacttgccatcaaattcattaagaccgatatgaggcctttttattcttgaaaaatttcttgttggacttaaaccaggtccattgtgataagcgttcaacgtcccacaaagatagcagccttctttacgcttcatcactcttttgtctgccatttttgtcctcctttgcttgtaaccacagttctttatacgaactgatagcatttacaattttggcaacgatatcagctgatagaatttctttttccaaatcaacagccagagttttttcattacttttagtatcaaaagcttctataatcgttgctatcctcgtgtcactgtaaaaaatagctatgtttgctccatttttagtacaagtaacgttatttttaattgcttgcaaattcctgcgcagtgcttcaaatgctcgatccaaagtcattggtcggcttttaacagaatcaacgaataaaataatttttccagcacgcgtatagctattcgtaacttcgtactcagcattagtgatcttcccaaaacatagcccatagacctcacccaaaagttcattaacctttccaagtttactttcatcttcttgcttcatttgctacgccaccaatcttttaaaacgttgaccgcagtcaataccgtatatgccgccagccacaccatcgcggtgacgatgaacatgaccagcaggactttgattacatcaatcatggcttatcccccgctctttcagctctttatcacttagtacactagacattgatgtataagtgtcattaggtttaatgaatacaaaccatcttgtatgccctcgcttgtcccctaaaattggatcgtggccaacaagtttcaaaacgtctttaaaagggatctggttatctgaccacttaacaagaagtaccccatctagtgcaagaacacaccacaattctttgaagcctgctctcaattcatcttgccagttgtctttatctagcctgccgtattttttcgctaaccagctatttttgccagctacattgagatgtggcggatcaaaaacaattaaatgaaattccatatcccgaaatggcaacttagtaaagtcagcaacaagatccggttggatttctattttcctagtgtatttacgatccttagcagtaaggatttcatcacgtatatctgtgtaagtagtatgtggctcatgcttatcaaaccaaaacatctttgaaccacatgctggatcaagaattttcatccctttaatcctctcttagcttcttttcatcaaacatatagacagctaaatgaccggcgcttgcgccacaaagagggcaatgcaagttgtcttctgccgttaaaacatcgtaagtgtctattgatacgttttccccgcaattatcacaatgaaacatcatttcatcttgtccatgtccggttaatcttttacagttcataaattttcacccctatctctgttagtccgtcaaataaccgttgtcggtcttctccaacaatgcagcctatgccttttctgccaataaattgagcacatgctatgtcgtcagtagtccaatagcctggctgaggttcagggtgcaccacttcgctaaatgtaaccttaatagtgaattccctttgaactaatgcatattgcttgccgtcaactagctggtccgctgacgtgatcagttttctagtcatcatcgtcattgtgtgtcaccttcttcaaaaaatcattgtctttatgctcttgccttagcttgtcgaattcatgatcaatcaattttaaaagcaattcagtatgtgcatcatgttttttatcattgttcaagcgcgaaagtatttcatgcatttcatgatcatcaagcatggtcagtgctttcataagcaagcgcgcattaactactcgcatttcttcatcagtcaaaacatgaccatcatttgcggtaaggctttcggcacagtcaaccactatcgcagatttgatatagtctaatgcaattgtcatatcatccgcacgttccactgatttctgaattttctttactgtttcgtctttcatatttattaattctttcttaactcaacttgcgcgtcattaggtaaaacaataacttttcctctttgccggatttcaatcttttcaccagtcgaatcattaccaccattgttatagggatacacactaacatcactataggtcttagagctcttgtccgaatagataaccacaacctccttaaaatgccccgtatcaataccgttagtgttcgtcatagcactattccaccatcccggcatcgtacagccggacagcattacagcgataattgacgctagaaatacgattttaatttttttcatttacttaaccctttctctttcttatctgctttaaaggatcctgtcgatcaagctcccgcagaattccagctatttcttccatcgcagaattatggcttttttgctttgcataatcgcaaacttccgaaaagttggtgtctaaatgagttcttactaaaagagctccgttaaagaagccagtaaacatccaaacaactgtatatgtggtgttcgtagcttcgcagtaaaattgatcaccggtatttacatcatcaaaaggtaaatcaaataattttggctgatccatatttagcctcctatacctcttttttcttgttcaattgcgtaatccattacttcaagggctaagcggctaaggtcgtaagtcataacaacgatttcattccaatcttcgggcgctagcacgtcatgcttttcaatttgcttcgcctgatgcgtcagctcgcgaattcggttatctagccccatatcagaccacttagtattttctagctaagtcgtttaagtcattcatcgctatttccgtttcttaaaatcttctagtaacttagcttcttttttgtttcttgcgccacattgcgcaattgctgaaatgtattcatccctgaataccgttttccagccatcgtcatctaaattatccaaacgcttatcaattcgagttataaacggcatgaccgtccgaataaagccttcttccgttgagcaacctttccaagctacttcatgtgaaatgtgaaacctatcaaaagttttcaaactatcaagcgaataagcttcaattctcacgttttttgggtttgccattggtataaagaagaatttaaatcccctaatcgtgataggaacaccccaccgtaccagccaacgaccttcaacatctaactccatgctggaccgtggcccaacctcaatagctacaaacttacgcattttaactcctaacctcttcaatattttcaaacccgtaatactgacctaacgcaacctccgcttcagtgaaattatcaaactcacctaaagcacattttttgaaaggataaagccagtacaactcgtacttttctttttcgttaagaacaatcttgataagcggatcaccgtcaagactttttacccgaaacagaacactaggcattgtgatcgtttctcacttttggtgcgtgtccaaccgtccacggtgctggcatttcgtccctagggcggtcaaagaatttatacggttcaaagtgcgtcacgtggttcaaattaatgcaccccccgttttttagccgaagccagttgttattttctgctaaagcttcgtaaatgctttctacagttacatccttagtcttaaaggtttgaccgtttacgtaagtaattgctacgccctttgtatagctgttcaaagaactagggcggttatgtgtaaagctactgttcttgtagtgacttgggttggtatccaattcactaaatttacttgctttaaacttacaattgccaaaattgtactttgtattcattttttgtttttaccttgtttctataaatctttaattactagttttggatagtctggttgcattaaagcaaccataaggaaggctttacccaacatttttctaaaaaattgccaagtgggtacatctgcaatgttaataacgattgatccgccgcggcagataccatctcccgcatattttgtctttttgatcttagacggtagccaaacctcaactgtgcaaacgttactaagcttccctaagtaggctttactaatctggtcaatttcataagcagttaaattagggttgctgtttgcgtacttttgacttgttagataaaatttcatgttaatctcctagtaaaccatgctcagcaaatgaaaagtaatttccattaccaacgataaaatggtctaacatgcgtactttaattagctcagacaaatttttaattgaatcagtcatctttaaatcagcttttgagggcttcattgaaccgcttggatgattatgtaccacaatgaagttagcggccccattaaggcataaggttttaacgattaggggcactgaaatagctgaattctctaccgttcctgaacccactaaatcatcagaaatgatttgtccttggttgcttaaactgatcaaatgcatttcttcgtgatcaggttccgcatatttgccggctaggtaatcgccaaaaccacgtgaatcatgaaagatcggttcccttgtagttgctaaccgcaattcaagctctagcaatctgatataagcctttagccctctttcagataagttgttgctaaacaaaccgaccgacatttcttttttaacgccttcaagcgttttaagcttgtcatagcgacttaagtcatcgcttaccgtattgattaaatcttccatgttcatttcttgaacatttttttctttgtaatttctttgagtcattgttttagtcctttactttccaagtaccaagtcccaagtaaacgattttccgatcacccgtaacttggatttttccgttattccgcgtatcaatcgcataaaggcgactattgggaatatagtcaacaccaagcttccatctcataaaggcgtattggaagacatcagataattggcgtggagttactacgcaaccaatttttaaatcaaaaatcattttttacagcctatcctttaactcttctttgctaataccgcaaatggtcataatttcatgaattgtttgcaaggcttcttttttggttaggtggtcatatctgccttgcaagtaagaaacggatacaccgtagaagtcggctagctgttgccaagttttaagactaggatttcgttttcccgtctcgtattggctcaaagtattatcgtgcatacttacttttttgcccaattctttcagcgttaagccatgattttttcttaattctcttaacctgttcatcacttaccccacctttcagaatccttgtcaattgctaacccatcacgaagcatttttagcagataggcgaatggatcattaaccatgttccattgcattttcatgtcaaacttgctaacgacggcttttaaggtgtcaatgttgcaccggtaaagcaagcttcttagttgcttaatttcgtcataggttggattagtagccttttgcttcatcttgtcgtacatccttgccagttggaaaaattgtttataaatttgttcacgttctgggtcttcttctcttcttcgtccagaagaagaattactatctgtattactattagatgtattactagatgtattacttggtacactatagttaatagggtctaaactattgttaataccctgtttactagagttaatactccctaaactattgttaataccccctttactagagttagtacctctaattattttgattgatcttgtggtaacccgattttcggttttgtaattaacacttatatagcccttttcctttaggtgcttgattatttttgatacataagccggtgtcattcctataaaactggcaaaatgtttattacttgcaaagcaaccgttctcaccatcaagactgtcaatttcagttaagatgactacttccataatgcttaaattctcatccagccagtaatcagcaggtatccaaactcctttaaacttgcgattgttctcgctagtttttcttttcttagccattttaatcacctaaaatgtcatcaaataagctttgttgctcttcactcattggagcgtcttcttttttatcagggaacgggtccgttttaggtttatccacgatatccttgattacctcgtcctccgatttaggtttctttatctttttgaccgcttctttaacttgctggtctttttcttttcggcggtcaattgctttttgctttgtcttgtcaatatgatgctttagctcgtaatcaccaagcaactgtctgatatagtcacttgtagccttgtcatgcttacccttaatccagtttttagccttaattgagtgattattaacgtaatcctcaaaaattattttgatagcattttcaatcaactacttgtgattgattcattttctgggcttgcgcatcgtcgtcatcttcgcttgcaatcccaaatgcggctgaaagtgaatacctttttccataactgatcaggcttgctgttgcttgtgcgttaccaacgttaacatttttgaaccaaactttattggttcgtacgctgtaacctgttgtcgcatcaacgattacggtttcaatagttacgccttcggcaccgttgtcaatatcgaagtagtaagtcaacaatggcttatcatcttgcttagtagctttaatagcgttcataattgacttatcaacatcagctaaatcagcatatttgtaagtgtagtgataaggcttgccgttttgagtggttcctcgaacttcaacttcgtgtgtctttcttggctgcacaatagccatcttgaccatggctaagtgcatagcccatgaagctttatcttttcgattctgctgctcattcgtataagtaagaattttcagttttggttcattgcccgttttcttatactttttgatgtcaaaattcttaattaattcttgatttggctcaaaaaaaatcactaaacccttgttcttttgtagtcattatttaattctcctcgctttaattccccagtcttttaagaagctgttcaattgatcgacttggtacttagtaacgttttgaaattcgagactgaaagtataagtcttgtccttaacttctcctgtttgagggtcaatcgccttatcgccatgcttaaccaagtcggcttgttctttttgcttagtttctttttgctttttagcaattgcaatcaattcttctttctccgcctgcatgtcattaagaatctcatcaagttggacctctctttgcaattgatcgaagtagtgtgcaaacggaattcctagttcatcggctttttgaatgatgattcgtttattagtttcgagttgctgcttatttttgcgtaaaatatcaacttgctcgtataattcagcttcaaatttagggttgctataagttttgttatcccagctggcgttatatctaatcttgctagggtctacgccagcgtctttacaagcctgtttaataaatttgacatgttgatcatgcttatcttgtctcagcttgtcatcgtactgtttaagctgtaaatcgatatttttagttgtttcgtcaataatcgctatcaagtcatcaatgtttgctttaaacatctttgctggcttttgaattccactagtaatcgaaattctttgtgaattgatagttcttttaagcttgttgagattctttcttacttctttggaagatttagggttttgcggcgttactgtccaatcagcgaattcatcatgaacttttaagatgttgcctttcatctcttcatactttgggaaaataatttcagctggtttatagcttactgggtactcaataccgtcaaattggattagttcgttgttagccatcgtaaatatctcctagttcttcgccgtcaaagtagtcaaagatcaattcttttagtgaatcttggtttaagtcattccaatcggctaagaaatcgcccattgaaaagcttgctttgcctagcccgtaaccaagcgattttgcaaacttgctcaagtcgcctttatagtcttggtttacctttttcatgaaaaagtccattggctctttatatgcgttgtcaaagtcatcagcatttttagtaattaatgcttgctcttcaccgtcccagaaaagaattgcgcccggttcttctagcgatagatcttttaacgcttgattttcatacaagtactttgcttcttttacttgttctgcatttaacgtttccatgtggtataatctccttattgaaatattttttctttgtttaacaccctttactgtctctagcagtagagggctttttgctttgccaatccaagaaactttttaacttctttggtcaatctagcgaaatccccactagcagtgctgatagcattactattagcaagaacgccgcattggacgtctgtaagtcgatccttttgtctacttggaatagcgcgtttataaatttgttccataacttcattagtcctccaactgctctttaatcatttttttaagagctttaaaatccgtcgatagcccgttttcatctgcttctttctttacccgctcgtaaaattgaatcgctagaatcatttgttgaggcagcgacgccatagttgctgtttggcattcaatgcccaagaatccatttttggattttagtggtacttgcaaggtgtcgcctgggatttgaagaattgcaaacgaattttcgttttgaataatttccttaactgccttttgcaaaatgtcataactgtcttgtctcactttttagtctccttaattcgttgctgataaccagtcagtcttaacttttaaaactttcgcaagttcatgaagtactcgcttgttaggaaaacttgaaccttgctcataccgtccaatagttctaactccaagccctacggcttccgccaattgctcttgtgttaagttcttgttctttcttgttcgctttaaacgaactttgaaaattgctgaattactcatgtgtttcacctactttctaagcttctttacggcacgtacgcctaaagccgtaaagagaattaatagaactaacaatagtgaaatgatttgatcggagtgcgttgtaccgtaaatgcaaacctgttcaacgattgcaaatggtaaaaatagaattgctaagaattctaagaactttccaaacgctttagtcatatgacttaaaacgtgatctaacttagttttgccatactctctttcgtattcgctcattttgctttctccctttgaacttgcttaccgttttcaatacagtaatcaatcactgaccttctggcttcgtttactagttctgttgtcttttccgactttttacggttttcaaagaacctaaccatcacttcacttaataagtcttgtaaacctttataaccaggttcaaaagccactaatgaaccattgtctagccagagataaaatctataatcttcatcgctggtgatattgaattggtccggattgtcgtcaaatacgccaaactctcttgcaatctcgtaaacttttttatctgtaactactgtcattttttaacctcctaaactgggactttcgcgttccaatcaatttcatgttggtgcttctgcatccattcacaagcttcttttgcaaagatgattgttctgctaccctcggctgtcttgcgaggatttactacaaatccgccacgcttgacgttaacttccgggtattcgtcaaagatgaaagttctaacccaactcttacccttaccttgacaacagatttttctaaattcatcaatgctccaagttttacccgttaagtcgtcttgattgtctttgattgattcattaacaatctgcttaactaacttcttcaaaattgaagtattgattaattggtccatttaactcgccccccttatacagattttctgtatttttcttttaaaaaaatcgaaggagaaataccgagaacttctgaaacccctaacgcaaaatcggcatcaaacctgattagcccattaacgtaagcgttaaaggtttgtcgattaacccccatcttatcggctacaaacttttgtgtaataccgtgagactttaaatattgctttaaaatttcattagcattggcaacagtaacctgtgtcattcgctcatctcctttataaagtttttctgtaactctttacatgctttatactactacagaatttatataatgtaaatacttttgtaaagaaattctttatttttctacatatttactgtatcaaagctaaaataaatatgtaggttaaataaggaggtagcaaaatgaagtttaatgaacgtttgtctaatcttagggaagatcacaattacagcaaaacacaaatggctaacatgattggggttagcctccctagatacgctaattgggagtacgggtacaatgatccagacatggacactttagttaaactggctaaaatacttgataccagtgtggactacttagctggtaaagttgataatccagcaccaaacgataaagaagtaaatgatgatttagatgacatgctagatgatgcccgctcttttgatggcaagccattagacgaacatgacagggaattagttagaggtatattgaaaaggatttacagcgaaaaataaggtgtttatttatggataccaatgttagtaaattactcaaattaaagcttgcatttgcccctttacattgccctggcttaatagttcatggcaaagatggcaagcccgatgtggtagtagttaactctaagcttgatgacaacgaagtagaaaacgttattcttcatgaaatcggacatgctaaaaatgatggcgatgttttaggcgactatcaaacggatgatggtgctcattcctgcagtgaacacggagcaaatgttttcatgattcacgaaaaagttaagcagtattttgcattaggaaatgaaattcaagatgctaactggctaaacatcgctaaaagtattgggacacaagattatttacaggttcaggaagaattaaatagatatagatttgaagaataggagtatttaaatgcacgtattattaatatttttatcttttatattgccaattgtttttgcaatatatcggcacagccgagcaaagaaattaaatattaaagattctaaatatggaaccatcacaatcatttcctctattgctattttcttttgtatggcagttgtaagtgggctaaccgaacctaaagctcaaacaaccgaatcaaagcctacgtctcataaaactaagaaaaagtcaaaatccgaaaaggaatttgaaaagaaaatggataaaatagctaaaaagcaagataaagaatttaattctaaaaaatctagtagcagttctaaatcatcgaaaaaaactggagtacctagcaataaatccctgcgcaaacaagttcaaaaagaacatcttactactttaaagaaacaattgagctctttagattctgaaaaatatggtggcgatactattgatagcattaatgtcatgggatcggggcatattgaagttactttcacaaaaagttttattaagcaggacactaaagatgaacgaactttaattcaaaaatccattgttgacgatattagcgatgcttataatcgtttagcgccatatcctggcaatatatctaaagcagatattgtattttttgatactgatggaaatggatacggaatttgggatactgatggaaacaaggaaggagaataaaaatagcccgcctactcaactgagtaaacgggctttattaataaggagaggattaaattatggcttacttacaaaaaaggggcaacacgtggcgcgctaaagtttcctggtacgatgttcgcggaaagcatagatttaaaagcaagcaaggttttttgaccaaaacagccgccagaaaatgggctaatgagatggaagttgcaaaagacgacaatcaaatatctaaccaagatccaatttttgctgaatactttaaggactggtatgagacctataaaacgcctggcacttcaaacaccactaagaatagatataaagttatttatgataatttgtctgagtattttggcaaaactaaaatttcaaaaattactagacacaaatatcaagattttatgaataagtatggaaaaacgcacgtaaaaggtacggtatataagactaatggaagtattcgaactagcgttaaagacgctataagcgagggactaataagaattaattttaccgaaagaattaatttgacttggaataatgaacgcagtagaaaaatagattatctaaatttcagccaagttcagcagctcaaaaaatcgcttttagacggaattacccctgcttacatcagtagatatatgcttttgactataatttatactggcatgcgcccgggagagatcagagtactaacttggcacgacatcgattttaaaaactgcactatccatatttcaaaatcatggaattatgataataacaaaattattgattatgattcagatgaaattgacaaagaaactaagaaccgttcctctactcgcgttattaaagtagatcagcatttactcaatattcttagtcaactaaaacagaacggtcacgaaagattatttattggcaaagatggaaccattccaacttcaagtgccgttaataaagtgttgcgcaaatattttaaaaagcttaatattaataaaaaaggttttcactttcatagcttacggcatactcacgtggctatgttactctttaagggtgttgacctttattcaataagtaaacgtttaggacacgccaatatgagcattacagccaatacatatgcttacatgctggacgaattaaaacaaaaatcggataaacaaatagttacaattctagatgaaatttagccgtttttgggaggttggagaccttttagagaccgcaatatatcaaaaagcccgtaagatcaacacttacgagcttataattacggaatgtgagggatttgaaccctcgatacaggtataagcccgtatacatgatttccaatcatgctccttaagccgctcggacaacattccatacaaagtactccggctgtcagactcgaactgacgacatcttgattaacagtcaagcgctctaccaactgagctaagccggaatattaaaaaagagcacggcagcttcctttcctcgcaggcagttgcccaccaactactttcggcgttaagaagcttaacttctgtgttcggcatgggaacaggtgtatccttcttgctttcgccaccgtactcttttgagcttttacactcaaaactaaacataatccttctcgcaaaaaaccttccagtttgcttcgctttggtcaagtcctcgactgattagtactggtccgctccatccttcacaggacttccactcccagcctatctacctcatcgtctctgaggtgtcttactgcttacgcaaaggaaatctcatcttgaggggggcttcgcacttagatgctttcagcgcttatcccttccgcacatagctacccagcgatgctcctggcggaacaactggtacaccagcggtgcgtccatcccggtcctctcgtactaaggacagctcctctcaaatttcctacgcccacgacggatagggaccgaactgtctcacgacgttctgaacccagctcgcgtgccgctttaatgggcgaacagcccaacccttgggaccgacttcagccccaggatgcgacgagccgacatcgaggtgccaaacctccccgtcgatgtgaactcttgggggagataagcctgttatccccagggtagcttttatccgttgagtgatggcccttccatacggtaccaccagatcactaagtcctagtttcctacctgctcgagttgtctctctcgcagtcaagctcccttatacctttacactctgcgaatgatttccaaccattctgagggaacctttgagcgcctccgttacactttaggaggcgaccgccccagtcaaactgcccacctgacactgtccctggcctggcttacaggtcgaggttagagcatccttcaaacaagggtagtatcccaacattgcctccaataagactagcgtcctatcttctctggctcctacctatcctgtacatgtttaaaagatactcaatatcaagctacagtgaagctccatggggtctttccgtcctgtcgcgggtaacccgcatcttcacgggtattataatttcaccgagtctctcgttgagacagtgcccaaatcattacacctttcgtgcaggtcggaacttacccgacaaggaatttcgctaccttaggaccgttatagttacggccgccgtttactggggcttcaattcaaaccttcgcttacgctaagctctcctcttaaccttccagcaccgggcaggtgtcagcctctatacgtcatcttacgattttgcagagacctgtgtttttgataaacagttgtttgggcctattcactgcggctaaccaatctcttggctagcaccccttcttccgaagttacggggtcattttgccgagttccttaacgagagttctctcgctcaccttagtgttctccactcgactacctgtgtcggtttgcggtacgggtatgtcatctctggctagaagcttttcttggcagtgtgattaccacaccttcgctacttttaattcactcctcttcacaactcgtgttgctggttagaagcatttgactcttaaccgcacttgttgcttgaacatcgttccatcgcgatgcgtgcttcacctcctgcgtccctccttcgctcttaacgatttgacacagtacaggaatctctacctgttatccatcgactacgcctctcggccttgccttaggtcccgacttaccctgggcggacgagcctgccccaggaaaccttagtctttcggcggataggattctcacctatctttcgctactcataccggcattctcacttctaagcgctccattgatcctctcgattcaacttctccgctcttagaacgctctcctaccacgtgctctttaaaacacatccacagtttcggtactatgcttagccccggtaaattttcggcgcagcgccactcgactagtgagctattacgcactctttgaatgatggctgcttctgagccaacgtcctagttgtctacgcaactccacatccttttccacttagcatagatttggggaccttaactggtgatctgggctgtttccctttcgactacggatcttatcactcgcagtctgactcccgtgtatggatatctggaattcgtagtttatctggattcagtaacccctgacgggcccctagtccaaacagagctctacctccattatcctctccacgaggctagccctaaagctatttcggagagaaccagctatctccaagttcgtttggaatttcaccgctacccacaactcatccccgcaatttttaacttacgtgggttcggccctccagtgcgttttaccacaccttcagcctggtcatgggtaggtcacttggtttcgggtctacgtcacctaacttttcgccctattaagactcgctttcgctccggctccgtcttttctgacttaacctcgctagataacgtaactcgccggttcattctacaaaaggcacgccattgcactttaatgtgctttgactacttgtagacacacggtttcaggttctttttcactccccttccggggttcttttcacctttccctcacggtactggttcactatcggtcactaactagtatttagccttgcgagatggtcctcgcggtttcaaccgggattcctcgtgtcccggcctactcaggattctgctaggcgtgcttgagatttcgcttacggggctctcaccctctctggcttaccttcccagataattcaactatctcttacactgccacgtcgcagtcctacaaccccaaatgataaatcacttggtttgggctctttcctcttcgctcgccgctactaaggaaatcgatctttctttctcttcctgcagctacttagatgtttcagttcactgcgtcttcctttgattagctatctattcactaatcaataatgcatctctgcattgggttcccccattcggatatctccggatcactgcgtacttaccgctccccgaagcttttcgtagttcgtcacgtccttcttcggctgttagtgcctaggcattcaccgtgcgcccttttctacttgaccttactcaagaattctcttctcggtcgctctacaatctgttctctttgattgtctcggttttttgcttggattatattcagttttcaatgtactagctctttgatcctttttctggatcaatggaggctaacgggttcgaaccgatgacctcctgcgtgcaaagcaggtgctctcccaactgagctaagcccccagagtattttattttcggccagacataactttaactctttttcttcgttatgtcaatgggcctaaatggacttgaaccatcgacctcacgcttatcaggcgtgcgctctaaaccagctgagctataggcccgactaacgcttggcgtttttcaaatctttgaggtactaccctcaaaactaaacaaagtttctcagtgtgcttccgcttgctctggatacttctcttagcattcctgctctccatatccttcgcttccttagaaaggaggtgatccagccgcaggttctcctacggctaccttgttacgacttcaccccagtcatctgccctgccttagacggctccttcccgaaggttaggccaccggctttgggcattgcagactcccatggtgtgacgggcggtgtgtacaaggcccgggaacgtattcaccgcggcgtgctgatccgcgattactagcgattccagcttcgtgcagtcgagttgcagactgcagtccgaactgagaacagctttcagagattcgcttgccttcgcaggctcgcttctcgttgtactgcccattgtagcacgtgtgtagcccaggtcataaggggcatgatgacttgacgtcatccccaccttcctccggtttgtcaccggcagtctcattagagtgcccaacttaatgctggcaactaataacaagggttgcgctcgttgcgggacttaacccaacatctcacgacacgagctgacgacagccatgcaccacctgtcttagcgtccccgaagggaactttgtatctctacaaatggcactagatgtcaagacctggtaaggttcttcgcgttgcttcgaattaaaccacatgctccaccgcttgtgcgggcccccgtcaattcctttgagtttcaaccttgcggtcgtactccccaggcggagtgcttaatgcgttagctgcagcactgagaggcggaaacctcccaacacttagcactcatcgtttacggcatggactaccagggtatctaatcctgttcgctgcccatgctttcgagcctcagcgtcagttgcagaccagagagccgccttcgccactggtgttcttccatatatctacgcattccaccgctacacatggagttccactctcctcttctgcactcaagaaaaacagtttccgatgcagttcctcggttaagccgagggctttcacatcagacttattcttccgcctgcgctcgctttacgcccaataaatccggacaacgcttgccacctacgtattaccgcggctgctggcacgtagttagccgtgactttctggttgattaccgtcaaataaaggccagttactacctctatccttcttcaccaacaacagagctttacgatccgaaaaccttcttcactcacgcggcgttgctccatcagacttgcgtccattgtggaagattccctactgctgcctcccgtaggagtttgggccgtgtctcagtcccaatgtggccgatcagtctctcaactcggctatgcatcatcgccttggtaagcctttaccttaccaactagctaatgcaccgcggggccatcccatagcgacagcttacgccgccttttaaaagctgatcatgcgatctgctttcttatccggtattagcacctgtttccaagtggtatcccagactatggggcaggttccccacgtgttactcacccatccgccgctcgctttcctaacgtcattaccgaagtaaatctgttagttccgctcgctcgacttgcatgtattaggcacgccgccagcgttcgtcctgagccaggatcaaactctcattttaaaaagtttgaatgattgctcattccttatttaagatctttgtctcaaatttattgctcgcgaattgacttcgcttcttgtttgggtttttacacccgcacacttttagcgaaactttgttcagttttcaaagtactacctctgtcttgcttttttgcaaagcagacagctttcatattttatcaaaccatcatttctttgtcaagaacttttttgatttgttttttcgtcttactcaagctttttctgctttcacctgacgacatttaaatatattaccagcttatttacttctttgcaagtactttttttctttttatttgttttctttccttgcatgtctgtttttaagctctcgtcgcatctctcgaagcgactttattaatttaccttattttctccgctttggcaagtcttgctcttcgttcggatttttaatatgaatatttcaatatcaaacgtatcttaatactattattcgcctctataataattaaaaaaatatttagcttgattttctctgcattcttcaaattgttcgaacattactttgtgaaaataaaaaaactttttaaaatttttcaacaaaaaaagtctgagattcttctcagactcatcttagacaccatacttgcgtcgaatatcgcgcttctggtctctttctttaattgtttgccgtttgtcatattcctttttaccttggccaacaccaatcaataccttggcaaagccatgttttaaatacactttaagtggaataattgcaataccacgctctgattgtgctttggccaaacgtgcaatttcttttttatgcaaaagaaggcgccgactacgtagtggctcatgattgtaccgattgccttgcttatattcactaatatgaacattttctagccaggcttgtccgttgacgatctgcacataaccatcccgcaagttgattcttctagctcgtacagacttaatttcggttccagttaaagcaattcctgcttccaatgtttccttaataaaatagtcgtgtcgtgcttttttattttgtgcaattaaattatcttctttttcttttttcattaagatcaatccctaatgtttaaaatttctccgacctccacggtttccattacctcggccacggccatgatcgctgtgattattaaactgaccaccacggcgtccatgattattgcggaagccacggtttccacgacgacgattattcattccgcgatcgttatgcttatgcttaggcgcattaggatcatatatttcaaagtctaactgatgttgttcaacgttagcattaatcaaggttaccttaattggcatccctaccttatattgcttatgagtacctcgaccagttagcgtcaatgctttttcattaaaactgtaaaaatcatcagtcaaattcgaaatatggattaatccctcaatcgtatttggtaattgaataaacatcccaaaactagttaccgaagatactaccgcgtcaaagtgttgccccacttgatcggccatatattctgtcatcttcaagtcatttacttcacgttcagtatcaattgaacgtctttcttgcgttgaagtttgttctgcaacatctggcaagtaactagcaaaatgcttttgcacttcttcattagtcccctggtcttgatatgcatggatcatccggtgcaccatcaagtcagaataacgtctaattggtgaagtaaagtgagtatagtattctgcagctaagccaaagtgtcccagtgcttcttctgaataatgcgcttgctttaagctacgtagcatcatcatttgtactacagcttcctctggagtatctgtagttttagaaactactttttgtaaatcaattggcttaacgttatttggatccgcatgaatattcaagccaaatgcgctacaaaattcaaagaaagtcttgattctttcggcatctggtgtttcgtgaacacggtacaagaatggaacatgctttttgaagaaatcttcggccacggtttcattagccattaacataaatgattcgatcatcttttcggcagtaccacgttcatgcaaaacaatatctgttggcttgccttgatcatcaacaataatttttgcttctggttcttcaaagtcaatagcaccacgttgatgacgttgtttatacaaagcagcatgcaaatctgccatttcttcaagcattggtcggagtttaacatacttatcctctaaaccattcatttcgcccttaagagttttgttaaccttgttgtaggtcattcgaccatgtgagcgcataacagaaggataaattttataacctactcttttaccttctggcgtaatttccatgtcacatgacaaaacaagccggtccacgccttcatttaaggaacaaattccattagaaagtctaaatggcagcattggaattacccgatcaactaagtaagtactgttgccacgagcaaatgcctcttcgttcaacggcgtattttctgtcacatagtgagaaacgtccgcaatgtgaacaccaaggtgataattgccgttaggctttttccataaaactacagcatcgtcaaagtccttagaatcatccccatcgatagtgactgcaggttggtcagtaatatctactctaccctttttttcctcttcagtaacatgatcaggaatagcattagcttgcgccattgcatcttcaggccattcagttcttacatcatgtgctgccacaattgacataatgtcaacgccagggtcatttttattaccaataatgttgactactgcaccagtcattgactcaggattttcctcatctggataatccttaattgagaccttaaccatatcgcccatttgagggatcaagccattttcagacaaataaacccggtatttatgcaactttttatcgttactcaaagcatagccgataaaatgactgttttttctttgttcatcagttagcggatgaaattcaccaactaacgtttccaaaccatgttcaaggatctcttcaacttgaccttctggtcccttaccattccaaggattaccaccagcagtgatctttacttttactcggtcaccattaacggcatacttggtataatctgcggcaacaaagacgtcgtccgcattttcatcatctaatctaacaaagccaaagcctttatcattagctctaaattcaccttcaacttcagtattttcttgagctaattggtattgtcctttgccatctgtaataatctttttatcgtgctctaaaaaagaaagagccttaattaattcagtaaaattacctaatctatcacgacgtgcttcacgttcaatttgatctacacgaaattgtttttgtggattatggcgaaaaatttctaaaacgccggccaaaattttttcgttttgtgccatgcagttattctccgatctttaaatttaataaaaaaagcctccccatcatattttgatcgggaggtacaaaatttattttgaagacatataagctaagataatagcaaagacgaaaaagagtaccaataaaactgaggttactttttccataaatgcttcaaaaccacgttttttggtttgcccactaaaaacggcaccgccagataaggcgttcaatgcatcttgttgtttttgtggctgcatcattgttgcaatgacaattaagattgaaacaatgattagtagcgtcataactaaattatacaatgcgctgcctccaatacacacatacgatttacttaccaagtttatcacaaattactagtttttgcagttatttttttagttcaggcgcatctgtcttgaaatctttttgcgtcgttttacgatgattttgataccacagtgaagttttgcttggatcatcaaacaaacgttttaaagatggcgccttgttatagtcgtaatccttcggcttgactctagtaaacccttttggtttatagaatcggagcagattgccattaattacacgatctgacaaagacagctgtgtagttacggtgttagaaattgcagttaatttttcttttaatttcttattaggtttgatcctttcgcccgtcttggtgtcataataatcgctacccaccttagaatattccggagtgataaagtcaccatttctttgtgctacaatttgcggtgcatttttgcttagcaagtcatagccaaattggatcgtatctttgtctttgatccccagcaagttcagtaaggttggtaaaacatcgatttcaccgccgtaggtgtgattaatgccaccctttagtcctttcatatggaacatcaaaggaactcgctggaactgcaaattatcaaagtcattaaacgaatctttcttaagtaattctgcactagccttatggtgattacctgaaatcccatagtgatcaccataaaatactactagtgtcttcttatctaggcccgtcttcttcatccaacgcataaattcaccaattgcttggtctaaataatgcgcggtctgcacataaccatcaactgtttcatccccagtattcgttttatcaatcgtctgattctttttatcgatattatacggatagtggttcgttacagtaatcatctttaaataaaatggttgtggtaaacgctcaatgtacttgattgactgatcaaagaaaattttatcttttaagccatatccgatatagtagcttggtttgttctgatagaaagacagtggcataaagtattggtagccaaatgacttataagcattatttctattccagaaggagccagcaccaccatgcattacagcagtagtataaccagcttgttgatgcaaaatggctggagcactttcaaaagtattagaagtaccatacgtagacattgcactacctgattgtagtccgtataaagaattttcaagcatcatttcggcatcagaagtcttgccttgtcctacttgattaaagaaattatcaaaactaatggtctctttttgatgataaatcttattcagatttggcgttacctctttacctttccatttgtagccaatcagaaattgttgaaaactttccaaatggatgattaacacattttttcctttagccacgccggtgtaagcgggattaggtttaacgtaattttcttttaaatagtttctaacagacttcaaatcagaaacattagctttggccatctgtgcactagtttgtgctgtcttatagccatcataaatagcgtattcattgattcccagatatttgacgatgtaattattatcaaaagttctcgtcaaaagtccagaacgatcattttgggccatcaataaattcagtcccattaagctgacagccaaagcctcaattaacaaattaacttttagcttcagtggacgaacatccatcttaattactttggtcgccaataacacgataattacagcaatatcagcaaaagctaaaaaatcgctagctagtgtaattcctgcaatacttttacccaaattatcggaagtcgagcctgatgtcttaataattgaaaatgacaaaaagtttgaaaattcgcgataatataaaatattggcaaataaccacagtgttagcaaaaaatcgataactaaaataatccaataggatttacgtcctttaaaaaatagcccaattcccagcaaaagcatccctgaaggaatcggattaatcagcaataaaaattgctgcattggaccaactgctcctaaattaaacttagttaaatagataaaataagttttaagccaaaacaagactaaaacaatcgtaaaaaagcctaacttagtctgtgtcagccacctaaaaaaagatttagtgtgttccacgcgcttctgctcctctcattacggtaatttatcttactacgaaatttagtaagacaccgttgttttaataaaaattaatcatttttgtgctttttatctttttcggcttaaaaatccagcctaagatgccgagaagcataccgaaaaaatatgttgaaaagcgccaaataaacatagccaaaattaacgcaccatgtgaagaaatgaaggtggagaataacgtttggaaactatattctgcccctcctgacgcacctggaataggaatgatcgccataaacatgataatcattatattcatttgcgtaacttgataccaagaacaaggtacatttagcgctgttaataccataaatggaacggagtaaaagaaaagtagctgcaatactgttaaaagcgaggcaacaaataatttcttcttttctttttttagtttctgactctctgcataaaaagtatcaatcttttctaaagtagccttacgccacttctcaactcgttcctttttcatcatttttgccaacaagtccattaaccaattagttgcctttttagtaaaacgataagcaaacataattgcaagcaaaaagataattgaactaacatgaatcaaaaagccaattgcaataaaaattgctaaaccagcgaacttagtcattaccatatgaaagccaaaaataattgtaaatacataggcaaacaaaacaacgatctgataaataataaatttcatcagcaaaattgaggtggaacggccaccttccatgcccatttgaatcattgcggctagctgtgatggttgtccacccgtggacattggtgtaattgcattaaatagagcttgaataattggaattcgcaaaaacgaccaagctgaccttttaggctctttctttcgatgagctaaagtagctaagataccggcttcacatacataggacaaaagcattaaagcaaaaaccatgattaatccaaaaatattcaggccatgagctgcccgtaatatttccgatatcggtgtagcttttaaatctgcatatagcacaaaggcactgattgctaaaacaaccagaatgccccacaaatgttttttattcattaatgtatttgacctagctcttttcctaattcatattgctcatgataaaattcgtcccaaattttagctaaatgatcttctgaatactgttgacttgccttacgcgataattcgctgtatttctgcaaagtttgtggattggcaactactttttgcaatacttgattcatttcgccaaaatcttttccgcttagataatagccatcgataattgccttataaagatcaaggtcacgcaataatactggtgttccacaactgaatgcttccaaaactgacattgggaacaattcatcatatgatggaagaacaaataagtctgcaatatttaaatacttaactaacttctctcgctctacaattcccgcaaacgtcatattcttaggtggattgtcaaccatttctttgtaatgatcatagccatcagtaattttgccaaacgaaaaaccgcctgcccagataaattgaatatcaggattagcttgtgccatcttaacaaagtcatcgatccccttgcgttcctgtacttgaccatcaccaaaaacaacaaatttatcaagtggaattcctaattcatgacgaaatgcgtttttgctggccaatgattcttcataaaattctgtttttgaaacaaaattaggaatatatctaaccttgttccgatcaattccatagttaaccaacttatcaataaagattggattaactacaacaatttgatccatgcgtttataaaaatcaattacatattgataaaaaacttttttagctacgcctggcaacttaattgagccttctaatgtatctggtaaaaagtgaacatagccaatcttcctgccacgtgctggtaaaaaactatttgcgtaataggttggattaatcgtgtgataatgcgttaaatcgctattgccatatttgttaatcgttacataaaattcgtctactaagtgcgtcctcagaagtttaatcaattcattataagctgaacctacaccctgtcctttaacagaatcagcttgcgagaacatattaattctaatcatttagttcctctttttagtctcctcatcatgcttaggttgatagtgatcaattgcatactgataaaaatcagacacatttttagcaaattgatcagctgaaatcttctgtaatttattttgcaaaagttcctgcgggattcttttcgtcccttgcttaagcaaagtaataatctcttctaacatttcttgttgtgtagtaaatgtctgcccaaaaatatcttgatcaaaaatgttttcggtatagtctgtgtcataaaccacacatggcgtacctgcagctagagcctcaatataagtcaacccctgtgtttctgtatcactagctgaaacaaaaagatcagccattcgataataattaccaacatcgccatgctctacattaccgacaaaaataacgtaattctctagtgttaatcgctctacctgatcctttaacacatcaacatcagggccatcacctgcgataacaaatttcacattaggaaattcatcaataatttcaggcattacgttcaaaatatgattaatctttttttcggctgcaattctacttaaggttaaaattacaggcgcatcttgatcaattccaagttcttgccgcacatcacgttgaatatcgttgttcatgccctgcaaatctactccagtaggaatcaccctaattggtatttgaacgccatagcgccgtaataattcttcaactcggccactaggagcaatacatccatccatatttttcaaatagcttttaacaaattgtctaacatgatatggacgaagcaaatgcccatttaaaatatagtgcaagtaatcttcatacatcgtatggtaagtgtggatagcaggaatatctaattgatgagctacatatttgccaatagtacctaatgcaaattcagtttgagtatgaactatatcaagattgacttctttagctactttggttgcttcaaatagtcctctaaatgctattcgccgatcggtaaatgagacaaaaggaatactgctaaaacgaaatacattcggttctacagttccttttttcacgttcggatcagtagtagtaaaaataaatacattatgcccctgcttttccaacgcttcttttaacgttttaattgaagtagctacgccacttatctggggaaaatatgtatcggtataaagaccaatattcatttgagtacctccatatgtagcattataaagattcctgtattcatgtgcaatttatataataaaatgctaacattttaaaataaaaaaaaagcgatccaataattggatcgcttcataataatagcggtgatcggggtcgaaccgatacgtccgtaatggacaccagattttgagtctgacgcgtctgccaattccgccacaccgccataatattaaattttaaaataatcaacttattcggttgataaggcggaggtcggatttgaaccgacgattaaggttttgcagacctctgccttaccacttggctacaccgccataagttatgaaattatttagaattgggatagctggattcgaaccagcgcatgttagagtcaaagtctaatgccttaccacttggctatatcccaatactagggcggaatgtgggaatcgaacccacgcatgctggatccacaaaccagtgtgttaaccccttcaccaattccgccatgaaggtaaacagggatagtaggaattgaacccacactagcggttttggagaccgatgtactacctttatacgatatccctattatggaggagggtggattcgaaccgccgaactcagagagagcggttttacagaccgccgcgtttagccacttcgctactcctccagatgatggcgcgggacggaatcgaaccgccgacacaaggagcttcaatcctttgctctaccaactgagctaccgagccatcttacggtccatatgggatttgaacccatgatctcctccgtgacagggaggcgagataaaccactgctccaatggaccaaattgcgggagctggatttgaaccaacgaccttcgggttatgagcccgacgagctaccagactgctccatcccgcgatattcaactaaggaggatgtgggatttgaacccacgcgcggcagaaccgcctaacggttttcaaaaccgtccccttaagccacttgggtaatcctccattgcttaatgccaaaaaaataaattgtggcaatgacccgtacgggatttgaacccatgttacggccgtgaaagggccgtgtcttaaccacttgaccaacgggtcatgtaactcactcaagagcactttattataataactaatcacatttcaaaagtcaagaactttttatttatttttttaattagctattactattgtgatctctcaatcacaacgtatttaatattaatagatattcagtcaaaatgcaagtacttttttatttttttgttgtaaaacatttatatctatcttaatacttcaaattagctagagcaaaacagcttctcttatctttaactaaatgatctttataaattgttccatattaaactgcttctttatatcactatgaaatcccccacaaaattatttttttaatatagatcatacaagaagaaatttaaaacaatcggctctccctatgttatatacacgattattgacttgaatcaatgtccaagacttttacctaaaagaagtgtaataatttccattaagtcattcaaaataatatgcatttaggtttatcaataactcaaaattaaggttttaacatcttatgacgtgttttcaatgcagagagaacttaacgaactcatctccttccatccactatacatatggttgcatataagacgatacatttgtaattccttactgtttcagcaggtatttactcctttgtaaacgtcccatactcataatatcattgctactggctcttagttctaacactttcatcggactaagaatgccgctcggtacacaaaaaaactgctctagaaattaatctagaacagttacttttctatatagcggagacagagagattcgaaccctcgcaccggaataacccgatctacacccttagcaggggcgcctcttcagccacttgagtatgtctccaatgggcctaaatggacttgaaccatcgacctcacgcttatcaggcgtgcgctctaaaccagctgagctataggcccatataaagcgggtaacgagaatcggactcgcgactaaagcttggaaggctttcgttttaccactaaactatacccgcacctaatataaaatgaaatggcgcgggacggaatcgaaccgccgacacaaggagcttcaatcctttgctctaccgactgagctaccgagccatcttacggtccatatgggatttgaacccatgatctcctccgtgacagggaggcgagataaaccactgctccaatggaccaaattgcgggagctggatttgaaccaacgaccttcgggttatgagcccgacgagctaccagactgctccatcccgcgatattaatataaaagccatattatggaccttgtaggactcgaacctacgacaggacggttatgagccgtctgctctaaccaactgagctaaaggtccaagcttacaattatagcggcgggggggatcgaaccctcgacctcccgggtatgaaccggacgctctagccagctgagctacaccgccaaaatgtaaccaatcaccattagattacaatcgggaaaacaggattcgaacctgcgaccccctggtcccaaaccaggtgctctaccaaactgagccatttcccgttatatgcgccctgaaggatttgaaccttcaaccttctgattcgtagtcagacactctatccagttgcgctaagggcgcatcatcaatgccggggatcggagtcgaaccgatacggttgaaaccaaccgcgggattttaagtcccgtgcgtctaccaattccgccactccggcgtgttgatgaaagcggaagacgggattcgaacccgcgacccccaccatggcaaggtgatgttctaccactgaactacttccgcgtaatataaatgccgattatacgacttgaacgtacgaccccctgtttacaagacagatgctctaccaactgagctaaatcggcatattgtcaatatgtggttggcaatacgggtggtgggacttgaacccacacgtccgaaaacactagaacctaaatctagcgcgtctgccaattccgccacacccgcatatatagggtcatgagccgtgagggacttgaaccctcgacccacggattaaaagtccgttgctctaccaactgagctaacgactcgatatggaggatacagggctcgaacctgtgacctcctgcttgtaaggcagatgctctcccagctgagctaatcctccatattgagcacggcagcttcctttcctcgcaggcagttgcccaccaactactttcggcgttaagaagcttaacttctgtgttcggcatgggaacaggtgtatccttcttgctttcgccaccgtactcttttgagcttttacactcaaaactaaacataatccttctcgcaaaaaaccttccagtttgcttcgctttggtcaagtcctcgactgattagtactggtccgctccatccttcacaggacttccactcccagcctatctacctcatcgtctctgaggtgtcttactgcttacgcaaaggaaatctcatcttgaggggggcttcgcacttagatgctttcagcgcttatcccttccgcacatagctacccagcgatgctcctggcggaacaactggtacaccagcggtgcgtccatcccggtcctctcgtactaaggacagctcctctcaaatttcctacgcccacgacggatagggaccgaactgtctcacgacgttctgaacccagctcgcgtgccgctttaatgggcgaacagcccaacccttgggaccgacttcagccccaggatgcgacgagccgacatcgaggtgccaaacctccccgtcgatgtgaactcttgggggagataagcctgttatccccagggtagcttttatccgttgagtgatggcccttccatacggtaccaccagatcactaagtcctagtttcctacctgctcgagttgtctctctcgcagtcaagctcccttatacctttacactctgcgaatgatttccaaccattctgagggaacctttgagcgcctccgttacactttaggaggcgaccgccccagtcaaactgcccacctgacactgtccctggcctggcttacaggtcgaggttagagcatccttcaaacaagggtagtatcccaacattgcctccaataagactagcgtcctatcttctctggctcctacctatcctgtacatgtttaaaagatactcaatatcaagcctacagtgaagctccatggggtctttccgtcctgtcgcgggtaacccgcatcttcacgggtattataatttcaccgagtctctcgttgagacagtgcccaaatcattacacctttcgtgcaggtcggaacttacccgacaaggaatttcgctaccttaggaccgttatagttacggccgccgtttactggggcttcaattcaaaccttcgcttacgctaagctctcctcttaaccttccagcaccgggcaggtgtcagcctctatacgtcatcttacgattttgcagagacctgtgtttttgataaacagttgtttgggcctattcactgcggctaaccaatctcttggctagcaccccttcttccgaagttacggggtcattttgccgagttccttaacgagagttctctcgctcaccttagtgttctccactcgactacctgtgtcggtttgcggtacgggtatgtcatctctggctagaagcttttcttggcagtgtgattaccacaccttcgctacttttaattcactcctcttcacaactcgtgttgctggttagaagcatttgactcttaaccgcacttgttgcttgaacatcgttccatcgcgatgcgtgcttcacctcctgcgtccctccttcgctcttaacgatttgacacagtacaggaatctctacctgttatccatcgactacgcctctcggccttgccttaggtcccgacttaccctgggcggacgagcctgccccaggaaaccttagtctttcggcggataggattctcacctatctttcgctactcataccggcattctcacttctaagcgctccattgatcctctcgattcaacttctccgctcttagaacgctctcctaccacgtgctctttaaaacacatccacagtttcggtactatgcttagccccggtaaattttcggcgcagcgccactcgactagtgagctattacgcactctttgaatgatggctgcttctgagccaacgtcctagttgtctacgcaactccacatccttttccacttagcatagatttggggaccttaactggtgatctgggctgtttccctttcgactacggatcttatcactcgcagtctgactcccgtgtatggatatctggaattcgtagtttatctggattcagtaacccctgacgggcccctagtccaaacagagctctacctccattatcctctccacgaggctagccctaaagctatttcggagagaaccagctatctccaagttcgtttggaatttcaccgctacccacaactcatccccgcaatttttaacttacgtgggttcggccctccagtgcgttttaccacaccttcagcctggtcatgggtaggtcacttggtttcgggtctacgtcacctaacttttcgccctattaagactcgctttcgctccggctccgtcttttctgacttaacctcgctagataacgtaactcgccggttcattctacaaaaggcacgccattgcactttaatgtgctttgactacttgtagacacacggtttcaggttctttttcactccccttccggggttcttttcacctttccctcacggtactggttcactatcggtcactaactagtatttagccttgcgagatggtcctcgcggtttcaaccgggattcctcgtgtcccggcctactcaggattctgctaggcgtgcttgagatttcgcttacggggctctcaccctctctggcttaccttcccagataattcaactatctcttacactgccacgtcgcagtcctacaaccccaaatgataaatcacttggtttgggctctttcctcttcgctcgccgctactaaggaaatcgatctttctttctcttcctgcagctacttagatgtttcagttcactgcgtcttcctttgattagctatctattcactaatcaataatgcatctctgcattgggttcccccattcggatatctccggatcactgcgtacttaccgctccccgaagcttttcgtagttcgtcacgtccttcttcggctgttagtgcctaggcattcaccgtgcgcccttttctacttgaccttactcaagaattctcttctcggtcgctctacaatctgttctctttgattgtctcggttttttgcttggattatattcagttttcaatgtactagctctttgatcctttttctggatcaatggaggctaacgggttcgaaccgatgacctcctgcgtgcaaagcaggtgctctcccaactgagctaagcccccagagtattttattttcggccagacataactttaactctttttcttcgttatgtcaatgggcctaaatggacttgaaccatcgacctcacgcttatcaggcgtgcgctctaaaccagctgagctataggcccgactaacgcttggcgtttttcaaatctttgaggtactaccctcaaaactaaacaaagtttctcagtgtgcttccgcttgctctggatacttctcttagcattcctgctctccatatccttcgcttccttagaaaggaggtgatccagccgcaggttctcctacggctaccttgttacgacttcaccccagtcatctgccctgccttagacggctccttcccgaaggttaggccaccggctttgggcattgcagactcccatggtgtgacgggcggtgtgtacaaggcccgggaacgtattcaccgcggcgtgctgatccgcgattactagcgattccagcttcgtgcagtcgagttgcagactgcagtccgaactgagaacagctttcagagattcgcttgccttcgcaggctcgcttctcgttgtactgcccattgtagcacgtgtgtagcccaggtcataaggggcatgatgacttgacgtcatccccaccttcctccggtttgtcaccggcagtctcattagagtgcccaacttaatgctggcaactaataacaagggttgcgctcgttgcgggacttaacccaacatctcacgacacgagctgacgacagccatgcaccacctgtcttagcgtccccgaagggaactttgtatctctacaaatggcactagatgtcaagacctggtaaggttcttcgcgttgcttcgaattaaaccacatgctccaccgcttgtgcgggcccccgtcaattcctttgagtttcaaccttgcggtcgtactccccaggcggagtgcttaatgcgttagctgcagcactgagaggcggaaacctcccaacacttagcactcatcgtttacggcatggactaccagggtatctaatcctgttcgctacccatgctttcgagcctcagcgtcagttgcagaccagagagccgccttcgccactggtgttcttccatatatctacgcattccaccgctacacatggagttccactctcctcttctgcactcaagaaaaacagtttccgatgcagttcctcggttaagccgagggctttcacatcagacttattcttccgcctgcgctcgctttacgcccaataaatccggacaacgcttgccacctacgtattaccgcggctgctggcacgtagttagccgtgactttctggttgattaccgtcaaataaaggccagttactacctctatccttcttcaccaacaacagagctttacgatccgaaaaccttcttcactcacgcggcgttgctccatcagacttgcgtccattgtggaagattccctactgctgcctcccgtaggagtttgggccgtgtctcagtcccaatgtggccgatcagtctctcaactcggctatgcatcatcgccttggtaagcctttaccttaccaactagctaatgcaccgcggggccatcccatagcgacagcttacgccgccttttaaaagctgatcatgcgatctgctttcttatccggtattagcacctgtttccaagtggtatcccagactatggggcaggttccccacgtgttactcacccatccgccgctcgctttcctaacgtcattaccgaggtaaatctgttagttccgctcgctcgacttgcatgtattaggcacgccgccagcgttcgtcctgagccaggatcaaactctcattttaaaaagtttgaatgattgctcattccttatttaagatctttgtctcaaatttattgcttgcgaattgacttcgcttcttgtttgggtttttacacccgcacacttttagcgaaactttgttcagttttcaaagtactacctctgtcttgctttttttgcaaagcagacagcttttatattttatcaaaccatcatttctttgtcaagaacttttttgatttgtttttttgtcttactcaagctttttctgctttcacctgacgacatttaaatatattaccagcttatttacttctttgcaagtacttttttctttttatttgttttctttccttgcatgtctgtttttaagctctcgtcgcatctctcgaagcgactttattaatgtataatacttgaatattaattgcaagtattttttcaataaagaattatgctcgctcttaaaaaggcgacttcaataatataccttaaaattcattttttgacaagcttatttttaaatgaatatttacaaaattcatgttaaagttgatacatcactactttgaggaggtcattaaaattaaaaaatttgatttaactattatcggtggcggacctgttggcctatttgccgcgcgatttgcccatcttcatggactcaagaccgtactgtttgattcattatctgaaacaggcggacagccacaaatgctttatccttttaagaaaatcaaagatattcctgcttacgactctattacaggaactgaactaatcgacaatttacgacataatttaacggatacaactatttttactaaccataaagttgaaaatgtcactaaacaaaaagacggctttattatcgatgatatagttgcatcccgcagcatattgattaccactggtgccggtgcctttaaacctaaagctttaccattatctatggatgatgatactcaaaaaaggattcattactttattaaagatcccccaaaatttgtcggacaaacagttggcgtctttggtggcggcgattcagcattagacctggcactagaattagctaattatgccaatgtcaaaatcattcatcgccgtaatcaatttcgcggtcttgaatctaatgtcaaaaaacttaagtctttaaaaaatgttgaaattttaactccttatcttcctaaacaaatcaatttggttgataatcaactgaacgttaatttaaaagaaatgggaaaagatagcttaactaatatcaagttagaccaagcagtcgttgcatatggctttaaagctaataatcgctttgtcaaaaaatggggaatcgatttagctggcgcacaaattaaggtgaattcaacaatgcaaactaatatcgccggtgtttatgcagctggcgatgttgttacctatcttggacgcgtccctttaatcgctctcggttttggcgaagcccagattgcaatcaccgcgattatgcgtgatcttttccctgaaaaaactttgacaattcattcaactagtttttaggagttccagatgagtttaatcgattttattttgcacattgatgaccatttaatcccgattgttaaccaattcggtggttggtcctatttaatcttattcgctatcatttttattgaaacaggcttagtcgtttttccatttcttccaggcgattcgttgatttttgctgcgagtgcaatggctgctaatcctaagtatggcttaaatatttggctagtttatcttatagtagcattcgccgccataatcggtgacagtatcaactatgaaattggtgcctggtcaaccagagctggtgaaaaacatagctggttcaataaattaattaatcaaaataatcggttggccgctgaaaagttctttgagcgccacggaccaattacgatcgttataggtagatttataccatttattcgtacttttgtcccattcatttccggcggcagtaagatgcattatggtaaatttatcacctacaacatcttgggtggcttgctttggacaggattgttcacaatcatcggtttcttctttggcaatattccatttgtaaaggaccatttttcaatgatcgtaattgctatcattttagtatcagttgtgccaatcgcaattgtcgcaatcaagaaaaaaatatcactcaaaaaagagttccactaaggaactcttttttacttacgtaataatttttcagcaaaatataattcataaataaccccagcaacggcaaaacaagaagcaaagaagccttccgttagcacattgataattgggtcagtattaggatcaaacagccaatcactattgttaaacaaaatatggtgaaaaatcacaaagaaactgtcgaaattggttactgcaaatggaaaaataataattggcaataatagcaaaataagggctactgatttatccaaattaagcagtagctttttcttttgtcgtttaaaaacaaagtgcactatgatgcagataataaaaactaatagagtcagaataaataaatgcttacattccgcaaaatgttctgccgcattagcagatgtagggaaattatccattttaagctgctttttaaagggccagagcaaataaaacatcagctggttataattatgcattaccttaaacaaagacatgtgaaccgtctcatatgtcttttgtacgatcataaaaataaacaataatggccaactagccacaattgccccaattacactgctagaaacagcaaacaaaaaatgataaatcagcgaaaaaatattgtttttagtaatcataattcaaattcatctaggttattaactaaaattgttggttgacgtttatctgcaatatccactttggtcgtcacacctgtcaaagtcaacaactgatctactccactattaaagccagctttaatatcggtatcgtaattatcacctaccaaaagtgcctcatctttgctatagccaactttatccaaagccatttttacaataattgattcaggcttaccaatatacagtggctctactccacttgctgcagcaacgaatgcacattgtgaaccattgcctggaattagctcatcctctgctggtaaattcatatcggcattagtcccaataaaagtggctccacgtctaatcgcccgtgaagctactcgtactttatgataagtcagatctgtatccataccgacaattacataatcgggattttcttcattaagctcaaactctggatgttgcaataattcatgccagagaccaatctgcccaataatatacaagccgatcttttccttgtgttctctttgtaaaatatagctagctgtggccatacttggcgtataaacatggtccgtatcagtttcgataccgtgtccctttagtttatcaactaccatttgcggtgttctggtcgtattgttggttaaaaacaaatagtctttccctgcttgaaccaaacgatgaacaaatcttactcctgattcaactgtttccttaccacgataaacagttccgtctaagtcaattaaaaatacccggtaatctttcactagtttccctttctctttttaataataaatgaatgatgccgtccaaattcttttttcactgcaattgattgtttttttcttaaatttagtttgatgaacacgccgcttcttaaacggattattttcatttttattcttccgataatttcgacgtcgtacatgataacgctcatttttaccaaaatcgcgctcgcgtcgttcacgtgatcgccgtattttagtacgttgatgctgataataatgtactggatgcgttaattccaagataaaataaggtccgccgggattacaatattccgttaaataatccacgatcgccatttcttttttatcaattgcggttctagcaccgtctttataaaagcctttcaagcgtaaatgttcactagaaacgtcccccaccagataatcatactggtcaagataaggatcatattttttacgcaaagattctaaatcaagtgcgtctcgctcattgacaatgatgctataaagctgcgcaccaatcttaatgctcttaccatcttgcaccacgtcagcaagtgggtgtctaattggctgttcttgttcaaatttattttcttcagtcatctttttcacttctcgctgttaaaggatatttttcagccaaatatttaccaacaacttcacgtaaaaattgtgggaataaaaactcattttcaccgacaatagccaaagttggaaaaaatggaactaagacataatgatccaaacaggcaattttatattctttttgtggatcaatttcatgcccattgacgtaaactacacgtctacgcatatcaaccttgatccctttgtaatacatctgaccaaaaatttttcctcgaaaactcatcccttgcagtggaaaatggtctaggtaatgccgattcttttcaatttccatcactagtcgccacaaatcataacctttcaaggttgaacgaacaacgtgcattggatgcggtaaggcattttgtaaatcatattgagtaattattccactcttaaacgggggcaagaataggcctgagcttaaaatggctaaatctgttttagcaaaatcagcaatcgcatcaagagaaacttgaacggctgctactttatcatccgcaaatttttcaggtaaattagccacttttcgttctgataaaagtcgcttaccttcatcatagtagccctgaatcactgccttatcttccggttcttctggcatcgaagcagtagaaatagtgcgaggtactaccttaatcacgtgatgatcttcaagttctagatgaatatcacccacatagtttccccatttacctgtttgcgtaatccaagtatgccccactttttcaccatgttcaatcagatcatggctgtggcctcctacaattaaattaatttgaggataatgtttagctaaccagcgatccatttttaatccaacatgagtcaataaaattaagacatcatactttccttcaatttgagctaattcgtgatccatactgtcacctaacatcttgacatgccaatgattaggaccataagtcattggataagctgcagtcaggccaattaaagcaattcgcgtctttttcttagtagttaaaaacatatggccgactgcccatttaggcattgattcatcttcttcacgcaaatttgctaaaactgtcggaaagtccgcatgatcaaataaatgttccaatacccaatgtggattagaaattccctcattattgccaatcgtaattgcatcatagttaaacccattcatcaatttgatgttggcttgaccttccgtagcatcagttaaaggatgagaccgatccataaagtctcctgcatcaaaagtgtagataccatcaaccgattgatcagcctgcgcttttttcaagtaacgtccgattttagggaaatgttcaaaatgtgaatgaagatcattggtatgtaaaattcgcagttgttccattttttatgccactttctaaccaattcgattggcttttaagatcatattatatgcgtctaaaatttttcccttaggtttatcccattctacccattttggatttttccaatcactttcattagtcaaagtctgcaagtcataagtatcattgatatatttttcataagcaatcagtgccttagttcgaggaatattcagctgcagtattttgacttttttaattaagccatgatctgcagctaattctgcaattccattttggtcaatattagagatttcataatatcgactgccatcatttctggtaacttcttcaattaagtccaattgttccattaaatctcatcctttagatttcaatcataccgattactgataaaagaatagtactataaatagaaaaaaatgtgtaaccatgctattgttaagtatgcgatagaggtgtacacatgaaatttaaaagccgactcgtttgggttcttttttttagcttagtctttttcataaatagtggttttacagttgtagggcaccgtggtgatcccatcaaatatcctgaagaaacaattcaggctgacgattccgcctttaattctggtgctgattacgttgaactcgatctccagctctcaaaggatggagttccggtcattgcacatgatgatgacctcttccgagttactcatacacatgcaattgtatcacaaaataattttacagcacttaaacaactgcaatatgacaatggcgaacacgttatgtcactcagtgagctttttaagcattatcaaaataaaccaaacactaaatttgtcttagagactaaaattgatcatggattaaatccgtcctatgagttagaggataaaatcgcacaaatagttaaaaaataccatatgcagaaaagaatcatgattcattcattttccgctgctagtctctttcactttagaaaaattatgcctgaagcttatctaattttgatcgttggtagcctgaaacgcattaatttcagtaatttacctcaagttaatgctatcaatgcttcttctgacattgtgcaagagcatccctttttaattcactggcttcacaaattacataagcaactgtttgtctgggccgaaatggacgaatcgcctgccctatggcattggctaattaatcggaatgttgatggcgtggttaccaactatcccgctactggttttaaatataaattagccaaaagtggcactaaaaagtacgctattaatagaactggaatttattttggtaaaactaaagccgctacaatgatgaatccgtatgttcgcatcaaagaaaagaagtacgtgcaaccaggtcaaaaagtcaatgtcacttatggcgtccgtgtagatgatcgcttattttatcaaattgctgaaaaaacttttatttcggcagaattcgttaattttgacttaacaaagcgagatattgctccttatcaaaataagaaaattatcgctaaacctaaccaaaaagttacaatttatcgttatcctgataaccaagccaaaacgcagcaaaaattacccgcaaatcaattattaaaaattcaaaattttaatggtagtcctaaaaacatgtggatttataccaaactaggttgggttaaggcaaaagatatcttgttctatggcttctttagtcaagacgatttcagagattatcagtccttaccacgggtcagtcagtacactaatctcgtgcttttgccctataatcctaatcaagcaattgcaccaaccacttttacacaaaagcttcaacagattaacaaaattatctactaaaacaaaaagaccagtaaactggtcttttttgcttcacttaattattgatttaaagtactttgctttttaactaattcatatggcaaaacaatatgagtatcatctacttcttcattgttcatcaacttagtcaacattctcattgctacggcacccatatcataaagtggctgcttaatcgtagtcaaagctggacgaacaacagaagctaactgcgtagcactggcggtcacgatttccaaatcttctggcactttcttacctgcatccatcgcagaattcaaaataccaactgatgaaatatcgcgagtaacaattacaccatcaacgccatctttaactaattgtgggtataaattataaccatctgaatagtctttaatatcagtatagattcgaggagtgcccaaatcattttcttccatgaattcttcataagcagggattctgttttcgctgttaactacagcatcttgatcaccaactacgattcccaaatgcttcttaccatcatggtacatcaaatttaatgcttcagtatcagccttcttatagtcaattgtgacagaagcaaaatcatcacgattgtctttagtacctgctaaaaccacaggagtatcagtccgcttaaaggcatcagctgctgcatctgataaacggttagacatataaattacaccgtcaacttgcttattcagcaaactttgaataacttggtcttccttcatcaagcggttttcaatactagtaataatgatgttgtatttatataaaagtgcaatatcatcaatacccttagataattctgcaaagtataaattagttaaatctgggacaattaaccctactgtagtagtccgcttagaagctaaaccttgagctacagcgtttggttgatagtgcagtcttttaataacttcgagaacacggtcacgtgtctcttttctaacattactattaccattcacaacacgagaaaccgtagccattgaaaccttagcttcccgagcgacgtcatagattgtaacttcttgtttatgcatctcttatctctcagtccttccaaaaaatccttcacttaaagatatcacgatgctgcataaaatgcaaacgtttacagcttttctttcattttttcattaagagatcatgatatactacagtaaacataatttgcaagaaaagaggacaatatgaacttagataaattacaacaatggttgcaagactccaataatgatcttgcttacatttctaatccaatcaccatttcctactttactggttactcaatggaaccacatgagagaatctttgctttaattgttttaaaagatgcggaaccatttattttctgcccagctttaaacgtagaagaagcaaaagcatctgcatgggatggcgatgttatcggctatcttgattccgagaatccttggagcatcatcgcaactaatgtcaaaaagagaactcacgatacccataatttggcaattgaaaaagatgatttgtctgttgcccactaccaactcttacgtggtgaatttcctaacgctagttttactaatgatgtttcaccttttattgaaaaaattcgtctttacaagacacctgaagaaatcaagaagttgcaaggcgctggtgcagaagcagacttcgcttttaagattggctttgacgcaattagaactggcgtcaccgaaagaagcatcgctggtcaaattgattaccaactaaaaattcaaaaaggtgttatgcatgaaagttttgaaaccatcgtacaagctggtaaaaacgccgctaatcctcaccttggtccaactatgaacactgttcaaccaaatgaattagttttattcgacttaggtaccatgcacgatggttacgcatcagattctagtcgaactgttgcttacggtgaacctactgctaagcaacgcgaaatttatgaagttgatcgtgaagctcaacaagccgcaatcgaagctgctaagccaggaatcaccgctgaagaattagatagcgtggctcgtgacatcattactaaggctggctatggtgaatacttcattcaccgcctaggtcacggcattggtaaaaacgttcatgaatatccatcaatcgtacaaggtaacgacttagttcttgaagaaggaatgtgcttctccattgaaccaggtatctacatccctggctttgctggtgtcagaattgaagattgtggtgtcgttactaaggacggctttgaaacctttactcacactgacaaagacttaaaagttttaccacttaaagactaattttagtcataaaaaaggagctgatcatcacgacaatgtcattaagttaagacattgacaaattgaatctaatctctgtagaaccgaatcattatgatttggttctttttttgcataaaataaaggcgaaaagaacctaccttttcgccctctgattaaattattaaaccttcaaaattattgccagaaagctggtgttaattatgaaagcccttcacagaaatattttagatcgtcttgatcaaattatcaatgatactggaaagcatattcatgattttatcgatgatcctcatgccttcactaggaagcggtttttagatgcagctacagtcattaaaactactattaatatgcaaggaaaagatttgaccagtgagttgtttagagcttttggccaaaaagctattaaaaataacgataaagtagtcagtacttccgcttatgtccaacgcaaaggtcagctttcacccgcatgttttaagcatattctaactgtatttaatcagaatttatttaatatccagttatttgatcataaatatcgtatatttgccattgatgggtctgattttaatcaaatctggaatcctaaatcagagaatatcgttggaaatctcaatcataaaggaaagccatattgccaaattcatgttaatgcactctatgacctgttaaataatacttatcaagactgcatctttcagcctaagtcaaagatggatgaacgtaaagccgccgttcaaatgcttaaaaagctaaattgcggaccatatatagttactatggatcgaggttataccggctttaacatgattgaaaattgtaatcgcctgcctaactgttattatgtcatacgtactaaaacgggatatggcgcatttaaggaagtagctgagttgcctaatcaagagtgtgataaggatatagcttgctgggtgactacctctaattattattatgaaacccataaggctacagaaaacgttcatttggttaaccatcattaccgtcaatatataaaatatcggtctaaaaataccaaagatggcagctgggactttggagagttatgtacaataaaatttcgtgcctgtaaatttagaattaatgatcctaaatcaggcaaagaagaatgggaagttgttctaactaatctaaatagagccgattatcccttaaaaaggatcaaagaaatctaccatttgcgctggggcattgaaacttcattcaaaaagttgaaatatgctttaggtagcgtacagtttcattccaagcaggatagatttattgaaatggagatctatgcccacatgattatgtttaacgcagtcagtcaaattgatgctcaagcatatgtaccacaaaaaaaatgcaagtatcaatatgcgatcaatttcaaacagtcatgttttgtcatccaggctatgtatataatttcttcttcaactgaaatctttaaaaagattcttattcaaattagtcattacacaattccgatcagaccaggacgaaaagacaaaagaaatctcaaacccaaatcagctgtatattatttatatcgtgtagcctaatttctaaacaagatttgggtttatttggcatgaaaaaagagcattcaaatgcgataaatcgcaaatgaatgatcttaaaagtccaagtcgataatttgtcaatgtcttaacttaatgacattgatcatcacgaccagctccttttctttttgactttaattaagcttgtggtttttctgaagtagatgctgcatcagtatcatctttttcagcattgttcaaatcgttaactgactcttcagcattttcactgtcatcgtcatctttatttgagtcatcgattacgatgtcgtcaaaatccttcaattctgaatcatcttcaacattcttagggaatgatgctaattgattcttaacgatttcagtaccattatcgtatttcttcttcaaatcttgaagcttgtcattatctttaatcttgttcttaacgtcatcaacttgttcatcactaacaagaagtgaacctgcgagaaaacctgctgcacatcctgcaacggcacctaataagaaacttgcgaattttttcatggtgaattcctcctttattaattttcacctctgcgacgcttgcgtcttgcaaatgccgtcgcagctattgaagaaataagacccgtacggcttaaatgattgctgctaaagcgtttagcgatctttttagatgaatcgtttaattctgatacgctttcgcctaaatctgcagcagctttaacaactggatctaacgtcttcattttaccattaacatcggtcattaggtcattagttttatctaacaaatccgaagtttgatccatcaagccatccatatcttcagaaattttcttcattgactcgttagttgtttgaatagttgcactagtttctttcaacaacttcgcggtccgaattagcattggaatcgtaaataatactaaaattaagaatgcaatcgccgcaattaagcctgctaaagcaccataagaaattgtcattttctacctccatcaacatctaaaaaaagtttagcatgaatatcctttattctcaattaatgtcttgttattcttaattatacccgtaagcaatagaaaggacaccaaatgaagattcctactcacataaatatacagaaaattgaaattgattggagtaaaattagccaaaatttattgtcaattatttggcaattagctattacttcactcattttttaccttttatcccattttggtcataaaataattaataattacttagccaagcataacacagttaagaataaaagaactcgaactatcacagctttgattaacagcgtttttcaatatacccttatcttcttctatttattcggtattctctctattctaggtgtaccagttggcaccttgttagccagtgctggaattttttccctagctttaggaatgggcgcacaaggctttgttagtgatttggtcaacggtttctttattctaagtgaagaccaatttgatgttggagatttagttcagattggcactaatgttggtaccgtcgtgcaactaggcctcagaactactcgtctcaagggttcagatggctcaattattttcatccctaaccgcaacattaccattgtgcaaaacctagcccatggcggtgtagcactagacattaatttggatcttgataccaaaaacgatattgatgaagttaacaagttaatcaaagaatgcaatcgtaagatccagcctgagaaaaagacaattgtatcaggtcctactattgtcggtgtgaccgaacaaacagggaaaaaatttgtttattccattcattttcaagttaagcctggtaaacaatctgctgtgaaaaatttgtatttgacccaatatattcaaattttacgagaaaataatattgcttttgcaagtacagaacgacctgcaaaaactactgcaaaataagtaaaaagtaactcagttcaaatcatacgaatgacccgaactgagctatttttatctaatcaaattgccttagccataaaatttactaaataattctgccaaatcaattcgaccaactgaatatggaatcttctctttagtcaatttaagtataagttgatctaatcctagattatcatccagtggcacaataattttattatcaggtaacttagtaaatcttttatcttttaaccgcgtcccggctattgcattcgcctcaattttcagatactgcttagcctgatgttgattatcgagatcttcaattacctttcctgccttcaagaaaagtacacgatctgcgtaagattgtagattatttaacaaatgtgaagccataataatcaatttattttctttttttagatctaataagtaatctgaaatcaattgtacgttttggggatcaagtccgttcatcacctcatctaaaagcattactggcgtatcagctgcaaccaccatggcaaaacaaagccgttgtttcatccccaaagaataagtttgtgttgggcgatcaacatatttttccatctgtaatttattaataatattatacgcgtggtgctagttaaatcgttctagacaataagccaaattataagctaaaattacaatttccaaccggctttgaaagcctatcagactacgtgctcgattgttctcggcattgtaataggtcagaagcgaaaagtcgctttcaattgttctgcgaatagccatcaattgatgatcattgtgctttttagctcctgtcatatttttacgatatggtgtccaaagttcataacccatttgttttagctgttgatgcagttctttgcctaaatagccttcgtcgccaagaagatagtaattagatggatgggcattttccagcagttcaactgtctccttggcatcatgaactgatgcttttgttacgacataatcaagaatgtaaccgtcatcgctaacaatggcatgaactttgaaaccatagaagtaaattttcttggtggccttataaccaatgttggcataaccgcgaaaaattttagcacgatagttgcgaattggttggcaaacaggtaccggaaagctgtcaatgatcaagaaatgtccattcaggtcaacctttttattcatttcttgccgtatctgataaatcaattgcaatagctgacgtgaacgccgattaaaacgtgagtgtgataaacaattgaaacattcacagaatcttctttgtgattcaattcctgtcttagcttgccagataagtaaagccaaaatcagactgtccgtagttttaatttgatcaatatttcgccgatgagtaaactcagccggtgcatacaaacgataccagtgccgacaaattatcactaaatctttaaaactaacttgtaaatggtggctaaaacgcttaagcttaaggcagttcaatcagatcaggctcttttctattattatacaagttgagtctaacaagattggacttttttattaactaaaacgatttaactagcaccacgcgtaatattatctacatttttatccgaatttttccaaagatccgcataaagctttaaatgatccctaccgctcataaatggaaacagatcactttgatcaggaaaagcacaaatcagtcgatgcagtttaataatctcacgattgctgcgataacgtaaatgatcatattctacataaccagcttgtggctcaagattatgtaaaattacgtttagtagtgtggattttcctgtaccatttggtgcaactaaacctacgatagttcctatttgaaaatttaaactaatttcatctaagacaacatgttcgccaaaagctaatttaacattatgaatttttaacatgttttcacctacttcactaatactacttttctaaactgacaaaatagccaaatagttaattcaattacaattgctaatgtaactaacggaataatcccatcattaaagtcccaacctggtgagtccattaaatacgataaattactagtcaaactttcgccgattgtaaaatatgtcattggtaagtgtttcaaaaatggataaacaaagcccatacccaatgaaaaataaagaactttagcactcattgccaaaacacttgaaataatagccgctacatattcatttctaaaaatcagcgacaataataaagtcaatctaatgaaaataaaggtaattacaactgcaaagatcaagaaaccaagataatattgtcccagcgtctgataaacaaagggcgttttgaaatacagacgaccagtataaattggcgttaataaattaaaggagccaaaaccataccttggcgcagtacacaacgtaacgactaaaaaagcaactagaaagttaaataaaattcccacttcaataaccgcagtttttagccaaagaattgtccttttagaaagaggaatattcttcactactgtacggtatttttgatcattggttatcatatctgccgcaaacaaaacaacaatcacaattaaaataatcatcgtccacccagaaagcgactgctgtaatctctgtaaagtagtccgttcttctaaaacatttttgtctaattttgctttacttttaagtaaaccatcatagaagtgaaatgttctttgatacccaaaatgtccatcttctttgtaattattattgtggtagtattccaagggatacatgtaattctgattttctttaacccaaatcaaattatccattttctgataccacttgctactgtatttggtatacaaacgccaatcatgattcttaagtgcttttaaacgctcatggtcatacttaatgatggtcggatatgtggtaacagcatctttagcaccttcactgggatcataatccgaagtacctttatctgcccgtgcaaattctttttcagccacctttaaaaaggcttgatcatcttgatattcttttgaaattgcatatggatcaacatcttcaatcacatgatgctgcggtgcgctgactaaaccaaagtaaagtgcaagcacgaccgtaatgaaaaacagccccacatttttaggattagtcaaaaatatttttaattgaaataaaaaatattgccttttcatttttcaacaccaccttggttaaccaaatgcctgaaccagattaccagcactacagcccacactagtaaaatagtcataccaactgcccaatttgccggaataattgattgacttgcaacagtcccatctaaaaccttactgatatttagataagctgaaggtaaaaagaaaagatatttagcaatgctacccggtaaaagtgaaatactgtagaccaatgccgcaataaaaatcgttagataaacgctatgagttaattgattaagcaacaatgccaggctagtcacaaacatcactagtacaactgcatagactaaatacaacaaacaataaagccacagtggaaccgcgctaattttaccgaaatacaaaactgctggataattcaaactattaaagccattcttaaaaccagcaaataagtaacttcctaacacaccaatcactaacggaagcaaagtcaaagcaagattgatgataaatttgccttcaacttcatccctaatctgataaggaatatttttaagcagagttggatgtgataaattaatcatccagctatcactagcaataaataaaacgtagaaaaataagaacatgccgactaatcctaaaatatagattaagtaggtgctagattctttagaattcatgacaattgctaagtgatgttggtacaaataatcataaactactaatttttgttgcagttgatacttcggtggaacatttagcgttgaagcaccgcgataattattttgataacccgccagcatcgtttgcactaactttttggaattttgcaaataatcttgaggcgaatcaaatacttcaccattttgtacaccggccaaatactcagcctgtttattcagattattaaaagtttgtttgtaatccttttttcgtagcaaattgctagaaaaataatctgcattaacatgaactgactcattgtagtctcgccattgacggtagccatcgttgattttctgcttttctacaaccagtacagcaaaaatcatgcaaagtaccaataaaacagcaagcaacatattctttttcgacttacgtgcaattcgaaaagtggcttggaaatattgcgatctcatttttctttctccacataaataattttgttactaaaataacccttaggctaatcctaagagttacattaattattaaaattatagtataaacattaaaaaaatctaatactcttcatatttgaattaagtcttcatatatgactatggcaatctgctagatatttcgtttagtccattctgattcaagaaatctaatatctgttgactttgctttttattgccttgaaaatatgccttataaaaattagtaactatcacatatattccaaaatccggaatattagctaattcttctattatttcataaccatagcttgcatcttgagactgtaaaatagtttgtgtaaggatgaatgattccttaaatttatttctttaaacattagaaaaaggagttcctttctcgtatgattggtttgaacaaaaaaacacatacagaaagaagaactccttcatgaatgattttaccaaagattttgctcaagctctattcaatccagacaaaataaatgatttattgcgcaaagaactacaacaggctgttaataacttgctagaagctgaattgactgcctttctgggctatgatccctatgccagaaatggctggaatactggcaactctagaaatggtgcttatttccgcaaagttgatacgcaatttggcccaattgaagtgcaagtgcctcgggatcgcaacggtcaatttcatcagcacacgctgcctgactacaagcagcactctgatgttttggaaagcacgattatcaagctctactccaagggcgtgaccaccagggaaatagccgatctaattgaaaagatgtatggcagccattacagtccagctcaggtatcaaatatttccaagcagatgattccaaaggttgaggcttaccacaaacgcaagctaagcgacaagtttttctgcgtctatttggatgcgacataccttcctttgcgccgagaaacgtttgagcgtgaagcagtctatattgccattggcattaaacctaatggacataaggaagtcattgactactgcattgctcctagtgagaacattgaagtctggacagagatgcttcaaaacatgaagtccagaggcttgaagcaagttgaactctttctttctgatggtgttgttggcatgaaaacagccttggccaggacttatcctaaagctcattttcaacgctgtttggttcatgtcatgcgcaatatctgcgctaaagtacgcgtcgacgatcgtgaaaagatcatgaacgaattcaaacaggtgcatcaacagacaaacaaagaagaagccacagctgtcctgcatgacttctataccaaatggggcaaggtttacagccatgttatcagaagcttgaaagacatagaaccagatctgctggtcttttataactatcccaagcagatcagagcttcaatttattcgactaacatgattgaatcatttaacaatgtgatcaagcgcaaagctaagcctaaggcagagtttccaactgaacagtcgcttgatgcttttattggtattcaggcaatgagctacaatgaccgttatttcaatcgaattcataaaggctttggtcaggttcaggacaccttagaatcctactttgattaaataaataattaaaaaatcaatttacgagaaagaactatttacacaaaagatttgacagtttcgactacaatcatttgtataacaattatgaaaataatttatgcaaatcgatgcaattatcttttgagtattaaatggtaatttcatcaacttccctttacatgttttttccagtttttttacaaaaagaaccagctcatcaaaatcaaacaaaagcattgaattacaaaaaagttgtaaggttgtaatatttttggtccaatcatcaacttcaaaaaattttctcttaatttgtgtaatttctctttgagttaaatcattaatcttattatttacaactgcatcaatcaaacgagctgatattttagtattttcatccatagctgcattttgtatttttgggactaacatactgattttctttttatcatgaatagaatatgcattaagtaattgaacttttaagtcttcctctaaattattattttccttaacatttagtttatttaaaaattcttcttcactaatgttattagcagctaaaatctttagtaaatctactgctactatttcattcttacctcgtcctacttttgaataaaacgattcactaataatccctttaataaattgttcctgtgttaatcctaaagaccgtctttcctctttcagcgcttccccaatactttttgacatatatatccacctcatttcactaaaaataactcagttcaaatcatacgaatgacccgaactgagctatttttaccttaatcaaattgttctaaccaagctggcaattcttggagcaattttcgcactgcattaccacgatgagaaatctcattcttttcatcagtagtcatctgtgcaaaagttttttctttttctggaatataaaacaatggatcatacccaaaaccatcttcaccacgtggtgcggccaaaatacgaccactgcaagtacctgacacaaccaagtctttatcaaattcacctggcatcgaaactacaatcgtagtccaaaatttagccgttcttttttcatccggtacaccgcctaattcagctaataacttggcgttgttctttgcgtcattgtgagcttcgcctgcataccgtgcacttctaacaccaggctccccatttaaggcatcaaccattaaacctgaatcatcggcaatcgtaggcaacttgctaaactcagctaattcatgggccttaatcttggcattagcttcaaacgtatggccactttcaatcggatgaggcggattgtctaagtcagcattcgtcttaatctcgatatctaccccagcttgtttaaaggcttcttttagttcttttgctttaccttgattaccagtcgcaaataaaatttctttaaccattattcattctccgtatccacatgcttagatgttaaagttgcatcatccatgaatgtccttgctaaatgatcaaaactagttggatcgcctgtagtgtaatattcatgactgactttttcattaccatcactaaacaaaccatcgcgccgcatcacattaaacgtatactgtgcaacttgatctgcaggatccaagatagtaacatttttatcattaattgcttctttaaattctttctgaatcaatggataatgcgtacagcccataattaaagtgtcaaagtcttttccttgtaagggggtcaaactctctttaactacttttaagttggtttcatgatctttttgagcctccacaagtggtgcaagtttaggagcagctaattccgttacctgaatttctggatcacggaaacggatctctttagcataagcatgtgattctgctgttgctttagttgaaactaccgcaacttttttattcttagttgtccgtgaagcggccaaactccccgactgaataactccgataatttgtggatcgatttctgcttgaatcgtactcatagccattgctgtcgcagtattgcaggcaaaaattatcagcttaacatttttatctaacaaaaaatggactgattttctaactagttcaataatctcttctttagttcgatcgccatacggcatatgagcgttatcaccaataaaaacagttgattcattaggcaatttttcaattactttttttgcaacagataggccacctagccctgaatccaataatccaatcggacgattatccataataaaaccctcttaaaatcaaaaatttattttctacttatactagtttacggtaaaataaaaaagaataaaagggatgaacaagtttatgacagaaaacacagaaaacacaaacgagcacgtatattttattaaccaactttaccgcgatttccttttgccaactattttaggcgatgatgacgcctcaattctttattgggctggcaagagaatcgcgcgaaaatatgatttaagtgattatgatgatttagttgaattcttcaacatggctgaatttggtaagctagaaaaagttaaagaaagacgatcatttactacttacgaattaagtggccaaactgtcactgatcgtttgaatagcgccagcaaggaattctcccttgaaggcggaatgatcgcggaagcatttcaaaaatcaactggtcgaaccaccgaatgtgaaattaatattttagataaagaaaagaaagttcaatttatcgctcgcttcggttaaaagcaaattgatagactataaataaccactactatatactttagttaaaatcgcatttttttagatatattagatataggagtagagcatgattaaagaatttaaagagtttatttcacgtggcaatgtaatggacatggcagttggtgtaatcatcggtgctgccttcactgctatcgtacaatctttagtaaaaaacttgatcaaccccctacttgggatctttgccggcaaaattgatttttctaacctcgtttttaaggttggggatgctacatttaaatatggcagcttcatcaattctgtcattaacttcttgatcatttcatttgtggtatttttaatgatcaaggctttaaatagagtaatgcccaagaaagaaaaagaagctggtccaactgaggccgactatttagaagaaattcgtgacttgctaaaaaagcaagtaaatcaaaataagtgatatatcaaaaaagcttgaggcaacatcgtctcaagctttttttgatttttaaattaatcagtatattgatccaaaatttggtttaacttttcctttggagtgtaaccagtaattcggtctacaatattgccatccttctttacgattaaagtaggaatagccataatacccaaattcttagctgtatcttgattttggtcaacatccatcttgtagaagttaacgtcttgacgttcttcagataattgatcaattactggtgattgcatcttacatggaccacaccaagttgcccaaaagtctactaatgctacaccattcttagtttcttcttcaaaattttgatcattaattgcttcaaccataattattacctcacattttttcaattcatttatttatattataagtatattctattatacttactttaattgtacaattgttgcaccattgccaccttcattagctggtgcataattaaagttctttacatgattgctgctgcggagatattgccaaacaccttttctaatcgcaccagtaccaataccgtgaataatcgtaaccgtatcaagtcctgccagtaaaacagaatcaatatatcggtccaaattagtcattgcttcatcatagcgttggcctcgcaaatccagctcgctatgagcattacttcttctaaccgcactggttgctctaacagtttgtctaggcttagtactttcgcccttttcaatcctctcaatatcgcgatcactaaccttaactttgataattcccatctgaacctcatattcatgttcagataacttcttagtaatcgtacctgtctgaccatatgagaggacctttactcgatcgcctacacttacatggtgacgacgtttttcacgctgtaagaccttattatgagccaaattattagcctgacgctctaaactgttgagttcgcctttagcttcaataatcttattttccttgacgcccatgttcttttgtttttcaagttgagcaataatctcatcagcttttttacggcgtttggcaacaacttcattagctcgctcttgtgcaaaatcaagctgtttttgtacacgttggttataccaatcaagtgcttgttgcaacttttgctccaatttttggctccgatccaaactggtttgcagacgattgcgagccacagtagctgccttggtttgcgtattcaacttggtgatcatcttattaatatcagaatcttcatctgacattaagttctgggcatttttgacaacatcttcacgcatccctagcttgcgggcaatggcaaaggcattactatgaccaggaataccaatctgcaaatgataagttggcgacaaggtctttaagtcaaattccattgaggcattagtcgtccgtggccgattataaccataaagcttcaattcaggatagtgcgttgtcaccatgatcttagcatcttttttacgcaaaaagtctaagatactaattgccaaactagcaccctcttctggatcagtccctgcaccaatttcatcaattaaaactaaggtctcagaatcaacattcttcatgatcgcaataatgtcattgatatgtgatgaaaaagtacttaacgattgttcaattgactgttcatcgccaatatcagcataaacttgcttaaagacgccaaccttgctaccttcttcagccgggataaataatccagactgtgccatcaattgaagcaatcctgctgtttttaaggtaattgtcttaccaccggtgttaggccccgtgatcagcatagtatcaaattcaccacctaaacgaatgtcattaggtactaccttttctgggtcaatcaatgggtgacgcgcttttaataagttcaaagaatggtcttgtgtcagacgaggctcacttgccttcatttcttttgctaacttggctttagcctgcaagaaatctagttcagttaatgcagccgcaatattattcaaactagtaatttcttcacgagccaaattagataagtgcttcaaaatattacgaatttcttgtttttcttgagcaattaaattctgttggcggttattaagatttaaaacggcttccggctctataaacagtgtttgaccactggcactttgatcatgaactaccccaccaaattttgcccgatattcttgcttaactggaataacatagcgatcatcacgaatagtcacaatttgctcagataaatacttactactattgcccttagtataagcatccatcttattcttaatttcctcttcattagaacgtatatcatgacgcaaacgagctagttcatgtgaggctgtatctaatacctcaccatcataatcaactgatttctttaattctctaaataaaagatccggcacatctaattgatctaaaatttcatcaattgcagttaaatccagtttgtttggatctatttctgccaaaaagtcattaatttcatgagctaaacttaatactaataataaattacctaattccttagcatttaaattagctttcacgcttaaacgtttagtacttggacgtacgtcctgaaagtccgttaaaggaagttgtcccttaattcgtagcaaattagtcaaagctaaagtctgctttaactcattttgtacttgttcaaaatcaccactaggtaataattcctccgcttcttttttagcgggaccagtaatcgctaatttactcaagcgcttagtaatttcgccaaattctaaaatctctaatattttcttgttcatttttatcttttttctaaaactaacaaaaaggaccagccacagccagtcctctttttattatttaccactcaagcggtcatcatctaagaaagtatttaaaactccctggaccatgtcccactcatcatcagattcaatctcatgcaaatcactacttgttacatcgccggcatcatcggcatcataactgaaagcttgcacctcaatatcttcatcatcgccaacagcggctggataaagaagcacgtaagatttgtcataatcatctgaatgaaaagtaaataatatctcatacaattcttcattaccttgatcatcaatcaaagtaatttgacgatcttgatcgtcaccattaacttgtgctgccattttaatcctttcggtgtaaatctaaataattttgcaagatgagcaccgctgccatctgatcaattacttgtttacgcttcttgcgatcatggatccctgcatcctcaacaagtactcgtcgtgattcaattgttgtcaatctctcatcagaataatgtacaggtaaaccaaacttttcctctagtcgtttgccgtatgccttacttctagctacggaactaccagaagtaccatccatattcttaggtaaacctaatacgaaaccgtcaacttcatactgtctgactagcttcttcaatggacgcataccaaagttatatctgctttcatcaatctggatagtctccaacttctgggcagtaattcctagctcatcgctaattgctactcccacagttttagaacctacatctaaacctaataaacgcattatttattcttaccaagataactcttaacaagttcttcaataatctcgtcacgttcgtgcttaagaatcaaattacgggcatcgttatgccgtggaatataagcaggatcgccagaaagtaagtaacctacaatctggttaataggattatagcccttttcttcaagcgcattgtaaacatcttgcagagtatcataaacattttttcctttgttctgattaaagtcaaaatgcatagtcttatctagcgaactcatatttattcctcctgtcaacaattttacttgaaaaaaagcttaaacacaattaattaattcttagttcttagaaatttcgtcaataactgccttaatagcatcattcaagcctgctggattcttaccaccggcttgagccatgtttggacggccgccaccgccacctccaaagattggggcagcgatcttgattaagttacctgctttaaggcccttgtctaatgccttttggtctaaagcaataatcatattagccttgccagcattttcagcagctaaaactaaaacatcagacttgttgccgctcttccagttatcagcaagttcacgcaagtcattcatcccgttaacatctgcagtagcagcaatgacagtcaagtcaccagcttgtttaacgtcattaaagatttgaccagccttagcagcattgatcttcttgttcaaagtttcaacttgcttttgagcatcgtgcaaatcactttcaagtgaatcaatcttatcgacaatgttatctggcttggttgccttaacttcttcttgaatatcatcaagtaagtctgaacggtttgccaagtattcataagccttcttagaagttacagcttcaattctacgcataccagcaccgacagctgattctgaagtaatcttgaagattccaatttggttagtattgtccacgtgagtaccaccacagaattcacttgagaagtcacccatttgaacaacacgaaccttatcaccgtacttgctatcaaagagggctaaagcacccatcttttcaccctcttcaggggtagtgatagtagtcttaacttgaatagcttcccaaatcttttggttaaccaattcttcaacggtcttaagctcacgcttggtcattggttccattgcagtaaagtcaaatcttaagtagtcaggatcaactaatgaaccagcttggtgagtgtgttcacctaagacttgacgaagagcagcgtgaagaaggtgagttgctgagtgagagtgacgtaacccttcacgacgttccttatctaacttcaatacgtattcttgacccttttcaactggcaaaatcaaatcaacaaagtgcaagttttggtcattaggagcgtgttgtacgtcagtaaccttggcaaccaattcaccgtcttggttgtaaatgtcaccgtggtcggcaacttgaccaccacgttctgcgtaaaatggagtcttgtcaaagaccaaagtagcatgttcgccatcggccttatcaaccaacttatcatcaacaacaatgtcaactagctttgcatgtggttcttcgtaagtatcacgttcaaagactgacttatccttaatgttcattaaagttacatcttgacgtcccattgattgaaggtcaccacgagctttacgtgcacgctctttttgagcagccatttctgcatcaaagcccttcttgtcaaccttaaggccagcatcttgtgctgattcaaaagtcaattcatatgggaagccgtaagtatcgaacatcttgaaggcatctttacctgaaatggtcttatccttagaattctttgccttgtcgattaagtcgtcaagcaaagtcaaaccagtatcaagagttgattgaaatctttcttcttcgttttggataacgttttcgataaagccgcgttgatccataacttctgggtagtgactttccatgatttttccaacaactggaaccaacttgtaaaggaaggcacccttaattcctaagcgttgaccattcaagtctgcgcgacggatcaaacgacgaagaacataaccacggcccgagtttgaaggaagcgcaccatcagcaatcgcaaaacttacggcacgaacgtggtcagcgataatcttgaaagcagtagtgtcttccttgttaacgccgtacttcttgtcatcagtcatttcttcagtggcgtgaataattggcaagaacaagtcggtttcaaagttggttggtgcatcttgcaaaatagaaagcacacgttctagtcccatcccagtatcgatattcttgtgtggttggtctacatatttgccatttggcaagtggttgtattgtgaaaatacgatgttccaaatttcaaggtaacgtgcattttcaccaccagggaagttttctggatcgtcttcagcaacgtcgttgttttcttgaccacggtcgtagaagatttcagtatcaggaccacatggaccttcaccaatatcccagaagttatcttccaacttaacaatatgatcagctggcatccctgcctttacccaaacattaaatgagtcttcatcttttggataaacagtacagtaaagcttttcctttggcaagccaagccaatcaggactagttaagaattcccatgcccaaggaatagcttcatctctaaagtagtcaccaactgagaagttaccaagcatttcaaagaaagtttggtgacgtgcagtcttaccaacattttcaatatcgttggttctgattgacttttgagatgaagtaattctgtgattttttggtacaactgagccatcaaagtacttcttcatggtagcaacacctgagttaatccaaagaagagttgggtcatcttgtgggattaatgatgcacttggcataatcatgtgaccatgatccttgaagaagtctaaaaacatttggcgaaactctgaactatttagtttcttcattaaaataaatctccctaaaaataaataaaaaacactattgctttcttcaaggacgctccacgcgcggtaccaccttgattgcaacagtgtttgttacctcttgatattcttaattatgaaacttaaaggagcattttttgactattattaagccattctcatctaactggctctctctttgaaataattgatcaaaaaacatatcttaagctgaaataattgtactacaaaatccgcttctgtcaaagcccttgttcacgcttgcgctttctcaaacgttttgccttacgaacctcatgacgctgttccaacttacgtttttgacgattatcctcttgaatcgcacgcttaatcttcttcttgtaacctggcttacgctttctcttctcttttttaacgtaacccaccagcttggtatcaagcttacgattcttgctttgacgattttcacgactgcgatagtgtttacgtggcactaattcaccattcttaatctcaacaaagtcaaaatgaacacccattttttctaggtcttcaatccggttcatttcttcttcacgaatcaaagtaatggcgtgacctgacaaaccattacggccagttctaccaatccggtgaattacaaactcaatatcacgtggtatttcataattgacaaccagactaacaccatcaatatctaagccacgagcagctaggtcactagctaccacatattgatactgtccttgctcaacctgacgcagagtacgctttctttcacgttcagttaccccaccgtgaattttagctaccttcaaaccctgatcttgcaaataattagtcaactcatcaaccttttgcttagtgttagcaaaaaccaacgccaaatatggttgtcccatagttaacaatttgtacaagacattcttgcgatcctttgagccaatatcaagcaaatcgtttttaatcgttggcgcaataacactaggattatcaataacgatatcatcaggatgagccatatatttgcgtaaaaagttagacaatttaactggaatagttgctgaaaaggcagcaatttggacatccttcggcaatttagcagcaacttgatcaatgtcgttcaaaaagcccatgtccaaggtcatgtcagcttcgtcgataacaaaagtttttacttgatcaactgcaaaaaccttcttttgaacaaagtctaacaaacgtcctggagttgcaatcaccaattgtggagtattattttgatacttttctaattgacgttcacgatcagttctgcccgcaagatgtgcaattgaaaaatgcatccctgccgcatcacggagctgccgtgctacttgataaagctgatcggctaattcacgactaggcaaagtaacgattgcttgaacatagcgtttatcttcttcaatttcattaaaaattggtactaaataagcatgcgtttttcctgaaccggttgctgcttgcactactacactcaagtcagacaacatagcaggaataactttctcctgcaccttagttggcttttcaaaatggatcttctttaaaccagcctgaatagctggtttaattcttgaatctataaaaatattattcatgatcttctttaaacttcttagttacttcaacgacttccgcaaatacctgctttacttcgtccatatccttagcgttagcaccactagctaatgcatgaccaccaccatcatgcttagcagctaattcattgattacagggccctttgaacggtaatgtacgcggaaagtaccatctggtttttcaacaaaaacattccaagcaagcacatctttaatacgtcctggagtagatacagcaacatttgcttgatcatcagtcaaacctaacttcttcaagtctgactgcatcaaaattgtaaaagctgcaccaacgggatcaatttccatcttgtccattgccaaggcttgcaattttgcctcatcaaaagttacatcagcaatattacgagcgatttcagtaatgttaattccagtagaagctaattgagcagccaccttaaaagtatgctctgaagtttctggatacatgaaacgaccggtatcgcctacaattccagcataaagtgggtaagcaacttccttggtaatcttaaagccctcttcattcaagaagtctacaatgatttggcatgctgctggagcatctggatctacgtaactcatatcagcatatggatcaacatctgggtggtggtcaatcttaattaaaaagtcacccttatcatacaacttattagaaattcttggtgtattagcggtatcagtagtaattaccaaagcaccttcgtaatcagttgccttgacttgatccatgtggttaatccaagctaagtcgccttcatcgttttccccagcacaaagtatgcgcttgtccgggaatttttccattaatgctctagctaaaccagcttgtgaaccaattgcgtctggatcaggactagtgtggcggtgcaagataattgtaggatattgtaagattttttcataaatgtcatcaaaactactcatttttaatctcctcatcttgtaaaaatatctgtatctagtttaccagaaaaatagctttatttattagtcgaacaaactgattgattgatattttttcttttcaaagtcagttacagtgactcccaataaacgaattccatcatctaaaaaggaacttgttgcttcgaacaagtcacgagccacatcataaaaatctaagtgactatcagaaggtgttttcaacttttttctcttggttaccgtatcaaaattattatttcttactttaataacaacagtacctgccttaaaattgcgtttttttaatgctgcttccaaatgattgcaatagttacgaatattggttagggcttcatcctcagtataaattgcaggctcgtaagtccgctccatgccaattgattttcgattagcctctgagtctgtaacaacaggtcttaaatctattccacgtgcatgttgggctaaaatataccccattttcttaaattttttaattaaggttaaaacctcaattttttgtaaatctgccccagtataaacacccatctgatgcagctcttcttgcgtcttcggtccaataccaggaaacttctcaatcttttgcattgctaaaaagttctgcacttcactaggcaaaattacggttcgaccaaacggtttggcgtattctgatcccattttagctaaaaacttattataggaaacgccaaaagacgagtttaagcctacttcttgccgaatccttttctgtaaatctaaagcaatttgaactgcagactcctgctctatctttggatgtgtcacgtctagataagcttcatctaaagccactgattcaacctgatctgtcacatcatgcataaaagaatggattttagctgacactgcacgatatttatcaaatcgtggtctagtaaaaactattagctccttgggaaccaaacgtactgcttgaattgcggccatagctgaatgaacgccatacttacgagctacataattgcaagtagccactactccatgtccaccattttgtcgtggatcttgcccaacaatcaatgccttatttttccattcgggatgctcccgcatttcaaccgaagcataaaaagcatccatgtccagatgaataatccgacgatggatgtcattttgcggtaataaattttctttattcataaatccaatgttcagttggtgactcaaagattgtattagcttcctttggccccattctgtatggcaaatattgtgcaatggctggattgcctgcttcattttccttctgccaagcatcttcaactgcatcgataaattcccaataacgcttcaattcgctccagtgcgtaaagttagttgaatcattgacaaaaacatcatgaagcaatctttcataaccatcaggtaccttagccatttcggcttttgaaaattcataagttaagttttcacggcgaattcctggttggtcaattcgtttgccattaatagtaaagtaaatttcactagttgggtcaatcacgatcgtaatattgttagaatgagcttgcccatatggattattaatatgctttaaaacaatgtcaatccggttcttcttttctttaaattccttacccgttctaaagtaaattggtacgccagcaattggtccctcattaaacttaactttacctgcaacgaaggtttcagtagttgactctggatcaacatttggctcttgcttataagcaaaagtagtatcactacccaaatattgaccacgaacaaagtatttcttgacatcatctggcgtaggaataattaaactcttaagcaaatcttgcttggcttggtgaacactagcagaagaaagatccttaggttctggcattgctagcagagtaataatttgaaaaatatggttttgtaccatatcacgcaaagcacctgaagtatcatagtaacctccacgtgcttccacgccaagacgttccgccaaggtaacttggatattcttaatatacttgctgcaccaaatattttgaaccattgggttagtaaaacgcattggcatgatattttgaaccatttctttacctaaatagtggtcaattctaaaaatatcattttcatcaaatgaagccgtgatttgcttatttaattcctctgctgaagccaaatcatgaccaaatggcttttcaactacaattcgattaaagccactaccagtcaagtcttggtcattaatatgcgttgctattgtgccaaagaatcttggtgccatagccatgtagaagagacgattgccttgtgcactataacgatcatcgagctcttgtgccaagtttttcaaaatctcatagtgttccacattagttacatcatgtgattgataataaaaatgacttgcaaaagctttcaactcattttcatcaacagtatcgtgcgtttcatgaatagcatcactaacctgctcacgcaaatactcatgtgaccaaggacgacgagcagttccaattactgcaaagttgtcgtgaattaagccttgttcatacaaattaaacaaagctggataaagcttgcggtgagccaaatcaccactaccaccaaaaagaatcattacaacgggaatattcttcatttcagatccctttctttgaactaaaattatcacttctattttacaacaaggatttttttagcaaaacaaaaagcgcctaaaatgacgctcttaagtaatatgattacttatcctcttttttagtttcgtctgctttttctttcggcttttctgctggagcttcagccttagtttcagctgcaggagttgctggtgcagcaactggaatcacacgacggacagccattctttcaaaagttaagtaaatgccatctgcatcaaccacgatagtcttatcactgttgatcttgtcaaccttaccatgcaaaccatcaactaagatgacttcgtcacccttcttcaatttgtccatcatttgcattctttgttgttgttgcttcttttgaggacgaatcataccaaagtaagtgaaagcgatcaaaataataaataaaccgatcatcatccagttgctacttgctgcagcaccggcatttgctaaaaataaaatgttcaaaatttccacctcattaaaattattttctagatattataaccattatacagaaaatgggactatttatcacctggaattggtaatcctaactgtaaatatgctttatccgtcaccattctgccacgcggcgtgagtaaaataaaaccatgctgcaacaaatatggctcatatagtgactcaatcgtttccatatcttcaccaacattagctgccaaagtccgaataccaacaggaccaccattatatccttcgatcatcgttctcaataatctgcggtctgtctgatcaagtccctcatcgtcaacctgcaattgttttaacgcgccttcagtagtctcgagcgaaattgttttttctcccttaacttccgcaaaatcacgcacccgcttaagtaagcgattggcaacacgaggtgtaccacgcgagcgtcgtgccaattcatgggccgcctcaggcgcaattgaagtgtgaaaaacatcacttgaacgcaaaacaatttgttctagctcatcgatagtgtaatactgcatgtgctctacgatgccaaagcgatcacgcaaaggtgctgacaattgcccagccaaagtcgttgccccaattagagtaaatggtggcagcggcacgtgaactgcatgagtagtctgcccctcgccaatcacaatatcgatatagtagtcttccattgcagagtagagtacttcttctactggcttagctaaacggtgaatttcatcaatgaacaaaacatccccaggatctaagtcggacaaaagtgccaccaagtcgcctgccttttcaatggccggaccacttgtactctttaaatgaactcccaattcattggcaattacgaaagccaaagttgtctttcctaaccccggtggtccataaagcaaaacgtgatctaatgcttcatcacgttggcgcgccgccttaatataaatgctcatttcttttttgacccgcttttgacctaagtactggtcgagcgtttgcggccgcaaagaaagttccatttgttgttcttcaggattctcaatatcacctgaagttacttgatcttctgccaccagtttcacttccttaaaaaataatcatctgttctattataccaagatctactttttaagcagtaatgctaagccctttttaatatattgatctgcagtatttgcagcaactttctccagtttaggcgtgatccgatccacttctttttgggtataacccaaagcaattaaagcaagcagtgcatcatttaatgctggcggcacattctcaccattgtctggacgatcaagccgagcaacataatcacctaatttacccttcaaatcaagcacaatttgtgaagccgtctttttacccacacctggaaaacgagttaggtacttaacttcaccttgttcaatcgcttccgccaaagaattactatcctcagctgccatgattgccattgcactcttaggaccaatcccgctaacactaagtagttttaagaacaagcccttatcatcttgactttgaaaaccatataaagtaatgccagtatcacgcaccacttgctcaataaagaccttagctttttggccttgagtataggcaaaaggtgtaggactatagaccttgtagccaacgcccccgacatcaactacaacatagcttggtgtaaccacagtaatcacaccttcaaaatattcgtacattattcatccttcttaaacatttttctcaattcattttggctcattctaaccaaaattatccgtccatctgcatcatgatatggatcagtacacttgcgtaaatcaagtaaaatttgctcagcttcagctgcagataatttaatcttgccagtaatttctcgcttagcttgcattgctgctatccggctaaacaggttctttgcctttcctttatccacattcaaataaccatctaaaatcttccgaattgaatcttcgacattatcgtgaatccaagttggatacgaacgaacaataaaactattttgtccaaaatcttccaaatagattccaacctgcttaatctgttctacttgatccttaatttgcataaaatcaagattaccaaattctaaaataattggtgttaacaaaccttgttgtactacttttttggcagttatcatgtgaaaaatttgctcaaattttaaccttcgtctagcagcaacctgatcaattaaaaataggtcgccattatgttgggcaaataaataagtatcggtctgtccaacataaaccaagcgaggcagattattagctaaagtttcatccccacttgaaatgacttcctgattagtcctagttgtaggaaatggcgttagtgcttgctgcagagcaacattttgtttccaggtcttagtaacgatatattgatcatcttcacgtggctgattaagatcaacatatttcttttcactatcctgctttaccgcctcattttgaatattatcttctgaatcatcagattcaatcgttaaaaattttggcttttcttgttcgcgaatttccggttcttttttacgagctgtatttacaacatcttgatttaagttaaaactaagctgatcaactagcgtatcacgtttattttccaaattagcaaaagcgctaatttgtccaactttttccacaagtgtattactaattgcactggtgattaaacgacccagttctttttccttggataaacgaacttcctgtttagtgggatgcacgttaacatccactaacaaaggatctactttaattgctaacacaataatcggataatgccgcgctgctaattttgagccatagccatccagaatcgcagtatttaattgaaaatttttaatatagcggccgtttaagagaatcgaaataaaattgcgtgtagaacgtgttaattccggtttagacatcagacctgtaatcttaaaatcgctgtcttttgcctcaaatttttccattttttctgcgatatgacggccatacacgttagcaactgtttgctttaaattattatttcctggcgttcttaataaaattttgccagtatttgacaaagtaaaagacacatgtggataacctaacacaagtcgattaataatatccacaatcttcataatttcagttcttgaactacgcaaatactttaatctggctggcgtgttaaagaacaaatccttgactgtaatttttgttcccttacgagccgctgcatcttcttggccttttttattgcctccactatagttagctcgaataccaattgcgttttcagttgcagtcagaatttccacatggctaacagcagaaatcgaagctaatgcttctccgcggaagcctaaagtggaaactttaaataaatcgtgttcattggcaatcttgcttgtcgcatgtcgggtaaaggctagatcaacttgatcacgtgcaatccccgtcccattgtcttgaactacaatctgtttcaaaccagcatctacaaaatcaacgcgaattcgagtagcaccagcatctaacgagttttctactaattctttaactacgctagctgggcgctcaattacttctccggctgcaatctgattagttaaagtttccgataactcatgaattttgctcattaatcgtcatcctttaaatctttttgccaatcagctaccatttgcataacctgcaacggtgtcttatctgctaaataaagattagaaatatcatcaagtatatcttgttgtgcatcagttattgcgggcttgtcattttgtgtttcagtttcttcaacactgttttccacaggctctgcaaataaatctaattgctgcgaaactggtgctagttcactgccttgtgcttcaagccgctttaataatttagttgcctctcgcaaaacgttgcgcggcaaacctgctaattgagctacatgaattccgtaactttgatcagcaggtccaggtaggattttatgcaagaagattaacttgccattttcttcggtagcaccaacgtgaatatttttcagatgatccagagtctcatccatcactgtcaattcatgatagtgcgtagcaaataatgccttagcaccaactttgtcgtgtaagtacttaacaattgcaccagctaaagccattccatcgtaagtagccgtaccacgaccaatttcgtcaaagagaaccaaactgcgcttagtagcatactgcaaggcttcattagcttcactcatctctaccataaaggtactttgacctgaaattaagtcatcagctgctccgattcttgtaaaaatttgatcaaaaattggcaaatcagcactatcagctggcacaaaggaacctacttgagccatgatcgcaatcaaagccatttgtctcatataggtactcttaccagacatgttaggacctgtaattaaataaatgttggttccttcatccattttgacatcgttaggaatatatgaaccagccgtcattactttttccacaactggatgacggccgttagtcacattaatatcttgattatctgcgtgaaaagttggccggcaataattattttgttcagctactgtagcaaaaccacaataaacatccagcgctgctagttgcccacctaatttttgtaaagcagggatatacttcttaacgtcctcacgcagcttaacaaataaatcatattccaagtcagttgaccgtgtctgtgcctcaagaattagattctcatgttccttgagttccggtgtgatataacgctcagcgttagtcaaagtttgtttacgcgtataacgatcaagtggcaccttagacttgttaccgttagaaacctgaatataatagccaaagaccttgttataaccgacctttaagttatcaatacctgtcttttgccgctcatctgcttccatttcagccaaccatttttttccattgttcatggcatcccgatagcgatcaagctgcggatcaaccccaccttgaatcaggccaccttcagtagtcaacacaggtggatccttcacgatagtggaagtaatcatttcggcaacgccctttaatggatcaatttttttagcaaaatcgaccaagatatctgaatctgattgctctaaagcatctaaaataactggaacggcctgcaaagaacgtgataattgtagtaattcgcgcgcattaacgttaccaaaagcaattcgaccagttaaacgttccaagtcgtaaacaccctttaaggcatcaactgcattttctcgtgtaaagtagccatcaagcaaggcctgcaccatttcttcacgatggttaatttcatccatgtttaataatggacgagctagccactgcttaagcaagcgtccacccatggcagtgtgtgtgttatccaaaacccagaaaagtgaacccatttttttgccagttttggcagaagcaaccaattccaaattattctgcacagtatgtgacatctgcaaatattgatttacttcatagcttttggcaatctgcaagtgcgctaaacttctcttttgagttgaaagcaaatagccaactaactgacgggtagcctctttttcagccccattagtcaaattctgttcaacataagaaatttcagcatgttcaccttcaattggagtaggtcgagaaatcgtaatgttggccttgtgcataaagtctttattttgttcagataatgacccgttatacacaacttcacgagtacgaagtgacaagagctcattggaaacagcatcgaaactctttaaatgagtagcataaatttcaccagtggataaatcactgtaggctaaaccaaagccactcttagtggtaattactgatgttaagtaatttgaatctttagcatcatttgggccttcattcatcatggttcccggcgtcactaattgaataattccccgtttaaccatgcctttggcctttttaggatcctcaagttgttcacaaagtgctactttataacccttttcaactaaagtatttacataagtatccacagccatatgaggcacacctgccattggaattggattcttagttctatttgatcggtgcgttaaagtcaattcaagaatctgtgcacctttaactgcgtcatcttcaaacagttcgtaaaagtctccgacgcgataaaaaagaaaggcatcaggatattgttttttaatttcgtaatattgctccatcattggagttgttttttccgtcatttatgtctctttcctatttcgtattttagatagagttacgtacaatattatacgctacaaaaagaaaaacttcgaagctgaactgattgtttaacttcgaagtcattttaattatatttgtttttgaactagagtgagagtttgtgcataagtttagtgctaaagcactgtaaatgaacttgattacttcgtaatcaagaattatatatctaaatgctaaagcattaagatatataattacatacccattcctggtgcaccagcttgtggagctgggttagctggcttttcttcaggaatttctgcaacaacagcttcagtagtaagcagaagagcggcaattgaagcagcattttgcaaagcggttctggttaccttggttgggtcaatgataccagcatctaccatgttttcccaagtatcagtagcagcattgtagccaatttcgttttcttgcttgagtaagtggttcaaaacaacttcaccattcttacctgcgttttcagcaatttgacgaactggtgctgacaaagctcttaatacgatttggataccagtattttcatctgcagtatcagccttaagatcattgatagccttctcaacgtctactaaagcagtaccaccaccagcaacgtaaccttcatcaacagcggcacgagttgagttcaaagcgtcttcaattctgtaacgacgttccttcaattcggtttcagtagcagcacctacgtggataacagctacaccaccagttaacttagcaagacgttcttgaagcttcttcttgtcaaagtctgaagttgattcttcaatttgctttctgattgaatcttcacgttcttgaatagcatcctttgaaccagcaccgtcaacaatagtagttgagtccttggttacagttacacgacgagcttgacctaattgatcaatcttagtgtcccttaattcaagacctaagtcatcagtaatcacagtaccaccagtcaaagcagcaatatcttgtaactgagccttacgacggtcaccaaagccaggagccttaacagctacaacgttgaaggtaccacgaatcttgttcaatacaagtgttggaagagcttcaccagtaacgtcatcagcaatgatcaataatgacttaccttgttgaacaatttcttgaagaagtggcaagatatcttgaatgtttgagatcttcttgtcagtgatcaaaatgtaaggattatcaagatctgcttccatcttatcgttgtcagttaccatgtattgtgataagtaaccacgatcaaattgcataccttcaactactgaaagttcagtgttgataccacgtgaatcttcaatagtgataacgccatcgtgaccaaccttttccatagcgtcagcgattaagttaccaacttcctttgaagatgatgaaactgcagctacgttagcaatttggtctcttgattcaaccttgtggctaatcttgtgcaattcattaacagcagcttcagtagctttttcaataccacgacgaatgccaactgggttagcaccagcagttacgttcttcataccttcattagtaattgcttgagtcaaaacagttgcggtagtagtaccgtcaccagcaatatcattagtcttttgagcagcttcagcaacaagtttagcacccatgttttcgtagtgatcctttaactcgatggactttgcaatggtaacaccatcgttagtgatgtcagggttgccgtaactttgttccaaaacaacgtttctacccttaggaccaatagtagtcttaacagtatcagctaacttattaacaccctttaaaagagaacgtcttgcattttctgagaatttaatatcttttgccatagattatctatgctccttaatttacttaattatcgttggaaattttaactaaattacttagcaatagctaaaatgtctttttcgtgaaggactaagtacttttcaccttcgtattcaacgtcagtgcctgagtatttatcgtaaagaactacgtcacccttcttaacagccattggaatcttttcaccgtttgatgcgtaagcaccttcaccaacagctacaacttcgccttcagttggcttcttcttagcatttgatgctaaaacgatgccaccaacagtttcttcttcttctttcttaactttaacgatcacgcgatcaccaattggttgtaacacgtttagtcccccttatgtttaattttcttcattatattttttattactgtattaatcattagcactcttatttgctaagtgctaacttacaaatatgataataaactgttttgtgaaaaaaagcaagaaaaaattagcacttttttcaattgagtgctaattttgatttttcttaacttttttaactaattacagtaatcaaaccatcaataatgccgtaagttaatcccattacatagtacttcttataagcatcccagaaatcatggcattctttcttatctttaccatcaataaaaaaatatttaccactttttctgctgctaaaagtcttaaccaaagcatagaaaacagcaactagcgccataataatgaagaggatgattgggaagaagtagccaataatattttgtaagttatatgctacacctgctgcaattaccactaatagataaattacagcaactagtggattgcagatcaaacgtggcatttttactttaaccgacaataacagcgataaaagtagcggcaagcttaagataattattaaaactaacacgtaaatattattgatctcttttaattgagacgcaaaagtatgatcaagcttaccccagaaaatacttagaatacctactacccaatagacagccgtcataatccagacatgtttaagcgtgctgttctttttcattcttattatcctttattgattagcaaaattatagcatagagcatactatttaacggggcgagcataagtgattcgacctttggccagcttatcgctcagtgagctacctaaactagagcggtgcacatcatctacacctaagttgccgccctcttcaataatttgcgtgtcccaaccatcatatttgccatcaacaattgctgcatgtccgttttgaccaacaccattgccagtattaacaatcacaatatcacctgggcgaatattcttggcagaaattttcttcaaatagccatgagtacttttagcatctcgttccattggcagagtaaaaaatggagcatttcctacacgatatcctgctctcttcattacgatccacacaaatcctgaacaatcagttgaaccgtttttattaggatgacgccaactgccaaaattagttcggtatgcacctgttccataagtgaaatagcctaataatttacgagcattcttaatcactctattatgatatcctgaatcatcgaacatcgctggagatggatcctcattaatgttgtcataccaagctatgtcaaaattcacatcatcagagcttaattctgttgactgatctgaatcatcattcacatcatcttgtgcctgatatgcctcaagctttgctttttcttgagcataatttaaaacattattttgtttaatgtatgcgttaggaccgatcttataataagcagtaccattaatcgtcttagttccttgcacattaatgaacttgccttcatatagttgtgattcaattactggaacattaccggtttgtatctgaccacgtgtcttaaaactggtcctcttaccattactcttatacacattagaagtagttttaactacataatctgtcttaggattaggcactgttatcgctgcctttattttagagctagttagattaatgctaaagacagttaatccagttactaatactccaataactccactttttaacttcataaaacataccctcactttgtttttctttatagagaacattttactcaaacttaaaattgaagtgcaacacttagtactaaaaaacgccaagaaacaatctttcttagcgtcttttattctaattgttttaattttttctagaggagtagaagaaactaattgtgtgcagtaacagcaatcaacttgtcgccgtgcttgtcacccgcatcagtaattcttgaaacatttgcatagttggcagtgttagtaattactaccatgacagtagtatcatagcctgcctttttcacagcatcaaggtcaactgtaccaagcttatcgcccttgttaactctttgaccttgcttaacgaaactttcgaagtgctcgcccttaaggtttacagtatcaagaccaatgtgaatcaatacttctgcaccatcgtctgacttaatgccataagcatgcttagtttcataagcaatagtcacagtaccagtaactggtgaatagatcgtaccatcacttggaataacggctgcaccatcacccattaacttagcagagaatacttgatcattaactttagttaaactctcaggagtaccatcaactggtgaagcaataacttcatcctttaatgccatttgttccttaccaagcttttcagccttttgagtttcttcagcataatcagttgcgtcgtttactggaacatcttgttcagcaacttcttccttcaaatgacccttaccataaacataagtaaggatgaaggcaacagcaaaactaattaatacggaaacaacccacattggaatagtcttaggataaattgaaaggaagcctaagaaaccagctgaaccaagagcggctgcagtaacatgcatcaagcccgcaaaagcagcagctacacctgaaccaattaaggcacagaagaatgggaatttatacttcaagttaacaccgaaaagtgctggttcagtaataccaagaagtgctgaaacacctgatgaactagccaagcccttcatcttcttgttcttagttaagaagtaaacagcgaaagttgcggcaccttgagctacgttagccatacatgcggtaacaaagataaagtcaccagagctggctggattcttagcaaaggctgctaaaagctgagtttcaaccgctggaaaactttgatgaagcccagtagtaacaatagttgaataggtaagaccaaagacacccatcccaaaggcaccagtagtgtcatatagccaaacgatagcattggtaataccatctgatacgcctttgaagactggcccaataattgtaaaagtcaaaaagccagtaatcataattgaaagaagtggcgtaaaggtaaagtcaacagctgatggcaagtgcttgtggaagtacttttccaaaattgacaatacccaaacagctactaaaactggaataacctggtattgatagttagtttgcgcaacatgcaagccaaaaatgtcccagaagtgatttgcaccaaggagtccaggtgtcgtcataatcattccgattgtagcacccaagaattggttagcaccgaaccgtttagctgccgacattccgactagaattggcataaaaataaacggagctgctgacataacttgaatcatacttgaaataccagcaacattcggtaccatctgaacaactgactttggtccaaacagacctggtgaagtcaagaagttgttcaaagccatcaacaaaccaccagcaactaaggctggaatgattggaacaaagatgtcagacaaaagtttaatgaaatccattactggattcttctttttaccttctgcagcaaccttcttcaaatcatcggttgataattctttcaaaccagtgattttaatgaactcatcgtaaacgtcattaacatctcctggcccaataattacttgatattgaccattggttttaaaagtacccttaacatctggatcattatccaatgctttttggtcgacttttgaatcatcttttaatactaaacgcagacgagtagcacagtgggcaccggcaataatattgtcacggccgacgtctttaattactcgttcagccacttttctgtggtccatattgatccctcctatgtaaacgttttattctcaattcactaattatgataacgcattcaaaaaatatgtcaatcgtttgacataaaattctttatttattttattacttatgaattaataattattttttctgttaaacgtttgacatatttttcatactaacttaaaatacatgtaaaaagacaacgctttcatggaggtatatttatggaatggacaagagaaaaacgttacttaccttatcaagattgggacgctgatacattaatgcatttgcaagcacaagccgcaaactccccttaccaaatgcgctatcatttgcatcctatttctggcttaattaatgaccctaatggattttcctactttgatggtgcttaccacctcttctatcaatcatatccattcggcgcagttcacggtctaaagtcatggtggcacttcaaatcaactgacatggttcactgggaaaacttaggcttaggtattgaaccagacacaatggctgattcacatggagcttattctggctctgctcgcgaaatcgatggtaagcttttcatcatgtataccggtaaccaccgcgatgaaaattgggtacgtactccttatcaaatcggtgcttggatggataaaaataataaagtttcagacaaaaccatcctatttaagaatccagatcacatcaccgaacattttcgcgatccccaaattatcaaagaaaatgacacttactacgcaattttaggtgcccaagataaaaaggaaaaacacggtcacattgacgtttggaagtctcaggatctaaagaactgggaagaattgggcttcttagactttaccaacgaagacatgggctacatgatcgagtgtcccaacatcgtccgtgttgatggcaaagtcgtggtcattttctgtcctcagggtttagacaaaaaagtagcagcttatgatgacatttacccaaatatgtacgttattgctgatgatattgactgggaaaatcataagttaattaatccaggtaaattacacaatttggatcacgggttcgatgtttatgccactcaggcctttaacgccccagatggtaatgcctacgaagtcagttgggttggcttgcctgacactacttaccctactgatgatgaaaactgggctaactgcttgagtcaagtgaaggaactccacctaaagagtgacaagttaattcaaacgccagttaaggcaataagcagtatccgcaaaaacgaagcaagcatatctaatcaagtagtcagcgatcaagccggccaacaatttgaacttgaattaacaattaaggctaaccaaagtggcactttacatttagctgcaaataatgacttaagtaacagtttacagctcaatttcgataccaaaaatggtaaattagtattagatcgtgctcatgctgggcaaaaagtagcagttgattatggcgaaagtcgagctattacgctttcaccaaatcatgacctcaagcttgatatctttgttgatcattcattaattgaagtattcgttaatgatggtgaaaaggtattgactggacgctactttgccgatcagaccaacaaaaaaattgcgtttgctcaagacattgactacactggcaagctttggcaaatgcaaacaattctttaaacatcaggtgatactatggcagcaaaattaagcgacgttgccaaaaaagccggttgctctgtaactaccgtttcgcgagtaatcaacaaccatggctatttaagtcaaaaaactaaagataaagtttttgccgcaatgcgggaattaaattatcgtcccaattctattgcccgctcattacaaggaaagaaaatgaaattagtcggtttgatttttcctgagatcactaatcctttttttgcggaattagtacaggatatcgaaaccactttattccaacaaaactataaagtaatcctatgcaatgcaggacaaaacaaagaaaaagaacgcgaatatctgcgcatgcttcaggctaatcaagttgatggcatcatcgctggtgcgcacaatctaggtatcaatgaataccaacaactaggtttgccaattgtctctttcgaccgaaagctatctgataatgttccaattgttagttgtgataattatcaaggcatcaagttggcagtacatgacttggttcaagctggttgtcacaaaatttactttctgggcaatgaacacagaaaaggtaatccgactgacgaacgactagcagcttatcttgatgaagcaaaggaatgtcacttttcagcccacattcgttcagttgctttttctgattcttccaacattaaaaatatgaaaattcatgatatgttagtcaatgatcagcctgatggcgtcgtctgcacagatgatttaactgcagtgttagttttacaagaagcaaaaaaattaggcattaaagtgcctaaggaattaaaagtgattggttttgacggaacaaagcaaattcaaacttaccattcggaactatccacaattgctcagccaattcatgatattgcaactttattggttaagttattgcttacccgaatttccaatcccgacgaaaaattgcgccaaaagaattatattttgcctgtcaaattaatcaaaagtgaaacaactgcatgaaaaaaagccgaaaatcggcttttttctacccaaagtcaagtattatcaatgatttaagaaaataaatttacttgttttaatgatgcgaataaggttaaagcaaataagagtttaaatttaagaaaaagcgaaagtaccacaaataagcctatgaatacttgtagtttttccataggttgcttatacttaagttgattatttgatttcagctaaagtcttttattttcggtggctatgttgtaatcatataattgatcatgtttgataagagcaaacattgtgcgtatcagtttatggactgatgcaatggcgattttcttatagccttgtctatttgaagatcgttttttcttgtcataataatcagttatatggcaaggctgcgtagcctttaccgtctccatttgagtaataactcgataaagtatttttctggcaatatgattgccatgcttggtaatgccaagagaactgtctttttcaccagattggtaccttcctggatcaatgccaacaaacgcatcaatttgagctgaagtgctaaaccgtcttagatcaccgagctctgctactaatctcactgctgtaattctagcaacccctgggatactcaaatagatggataaagcacgagcgtttactgctttagccagcttttccatgtagttaattacatagtcgcgttcttgctggagtgaaaataaattagaaatgttcctttgaatagctctaacgataatactatctttggaatcataaggataagcttctctagcaaaagcgtataatcttgtggttaagtaccgtgccctttgttgtcctattccagaaatagaattaagcatttgagttacctgtgtctcattcttttctagaacatatccagcatgtgggaaaagactaacaagcgcccaataaattctgccagatggatgagacagtatttcttcaatttgtgggaaagtggattggaggttgcggtgcaattgatttttagtagtaactatactcctagtaagttcttcataatagcgactggcattctgaagttcatgatactctctgggctgtggatcacgcagcttttgcggggcattaaattgaattaaagccaggcgataagcatctaccttatcagttttattatggcgtaaattattgtccattagctttttcgctttaagcggattaagcttcaaatacttaatatgataatcctctaagaaagcttgcaggcttagagaataaacaccagtagcttcgaaaacaactaaaggagttatcaaatattggttcagttgctcataaagtttttgatagccaaaggaatcattagagattctaaaagattcgccttgtttgatccggtcattaaccacacaaactgtggaagatttactgctaacatcaataccgaaaataatttgtgattccataatataacctccgctgtgaagataaacctctttatcaacctattaattctaattttctaaacacggcatctaagtgcccacagacttcgaagagacttaagaataggtggtaaagcagtccgtttcttttacgacatcaagtgtctaaaaagctgaagacttgatttgctttatcttcactttctattttagacaaaataaaaagtgccagatcgtgaatccgtcgattcatgatccaacactaggttagtatgtttcttttactcaaatttagttttctttgtcactatctaagaaatagatcaacgtttgcaattcggttgctaagtctacattttgtactcgcacatcagctggagctgataaacgaatcggagtaaagttcataattccctttacacccgcatcaaccatttcatctgtggttttctgagcagctgttgaaggaactgtcaaaattgcaattgtaatctgttgatcacttagttgttgctttaagtcgtccatgtcataaacagggacaccacttaagatacgaccagtaatctccttattgatatcaaaagcacaggaaattcgaatattattactgcgcttaaagttgtaattaagcagcgcccgtcccagattacctacacctattaaagcaacattagttaaagtatcttgattcaaaattttcttgaagaagctcaataaattctttacatcatatccatagccacgttttcccaacgcaccaaaatatgaaaagtctcttctaattgaagcactatctacttgaactgcctctgacagctcagttgaagaaaccttatctttgccttcttcatttaaaataatcaaataacggtaatataatggtaatctttttgccgttgcttttgggatttttattttttccatataggaaccctccaaacttaaatgtttgtgaatgtacaatcaagcactactatcatacctgctatgatagtacttatgcaagtatctttttcacaaatcatcattttttcacatatttaacttaaaaacaaacaatttgcgctatatggtagaatagtggttaggtgaaaaattatgattattgcacaaggacacgatttagaacaacaatttggggccaacacattattcaaaaatgttaatttttcaatcgattccaatgccagaatcggcttagttggtcctaacggggttggtaagactaccctgttaaaaataatgacaggtgagcaagaaccaactcacggcgaatttacagttaataaaggcattgatgttggttatatcgctcaggaaaatgcattagatgaaaataaaaccatttgggatgaaatggaaaccgttttcgctcctttaataagggaaagaaaaagcttagtccaactacaagaaaaaattgcagatcatcctgaagatcaagaattgcttaagcaatacgatcaaaagcaattcaactttgaacaaaaaggcggttatacttatcaatctgatattaaaagtatcttgaatggctttaagtttcctgaagacacttggcaaaagaagattggtagtttatccggtggtgaaaaaacacggttagcttttgttaagttgcttttgcgcaaacctgctctgttgttattggacgagccaactaactacttagatttagataccctagattggttggaaggatttttaaagaattacagtggtgcaatcctcgtggtttcccacgaccaatatttcttagatcatttagcagcccaaatttttgaactagaatttggtaaattaactgcttttaagggcaactattcagcctatgtcatgcagcgcgagcaacgtgataaggaccaagaagccgcttatgaaaagcaacaagctgaaatcaaaaaagatgaagaatttatccaaaaaaacttggttcgagcaactaccactaagcgtgcacaaagtcggcgtaaaaaactagaaaaaattgagcggattactccacctaaacataaaaataaggtacggattcatttttcaagcgatcatccttctggcaaggaagtattaattttcaacgatttgacgattggttatcccgataaaaccatggttaaagatatttccttccagattaataaaggagatcgcgtcgcgatcattggaccaaatggaatcggtaaatctaccctgcttaagactattatgaagcaattaacgcccaagagtggctcaattaagtatggcgcatcccttgagattggttattacgaccaagaattacaaagactagatccatctaaaactgtattggatactgttggggatcgtcataagaccatgcctgaacgcgatgtacggtcaatcttagccagctttttattcacagctaaagacattgataagaccgtaggtcaactatctggtggacaaaaagcacggttaactttaactgttttatcacttgaacatgataacttcttactgatggatgaaccaactaaccacttagatatcgaagcaaaagaagtactagaaaaagctttaaaagactttgatggtaccctgctctttgtttcccacgaccgttactttatcaatcaactagctaataagattgttttagttcgcgatgggcatgctaaagtctacgatggcaattattcttattatcttgatgagaaggcaaaacaagcagctatggctgaaaatagtgccgctgagacagaagtcgagccaagcaaacaaattagccagcaaaaactttcttaccaagagcaaaagcaacgtgattctcaaaagagaaagttgcagcgtgcaattgataatgcagaaaaacaaattgaacagcttgaagaacgagagcaagaaatccaaaccgaaatggccaatccagaaattgcttcaagctttgataaattggggccactgcaagaacagctttctgatgtacaacagaaattagatgaagcaaattctgcctgggaaaaggcaatcgaagaaatggacaattttgaataaaagtataataagtaagttctaatatattaggacttgcttatttttatatgcgcatattaaaataacgtaccttattattcaattgtgcctgtatatacaattcaagaggtgtatcttggttttgaaatgcataaacataagcatttggggattttttgaaagaattttttttcgtgacacaagatgtatcacttactggtgctgcacttttaatcgatgctttacaagcaaacggtttaaacaacatgcatggtggtgtcggcattccagttactgactttgcccgtttagctgaattaaagggtatgaagttttatgaatttagaagagaagatgcagctgtagacgcagccgctgctgctggttttcttaccggcaagcctggtgtagccttaacagtttctgctcctggtttcttaaatggtttaactgctttagcagaagccactaagaattgcttcccaatgattatgatctcaggttcatcagatcgtcatatcatcgacctcgaccgtggagactatgaaggacttgatcaatacaatgttgctaaacctttatgtaaagcagcttatcgtgttgaccgtgctgaagacatgggcttagcagttgctcgtgccgttagaactgctatgagcggtcggcctggtggtgtttaccttgaccttcctgctgcaacagttgccgacacagttgcacaaaagtcagacgctcatatctatgaagtagtcgatccagctccaaagcaattgccatcagatgatgcaattgaccgtgctgttgaattattaaagaacgctaaacaccctgctattatcctaggtaagggctcagcttatgctagaagtgaagcagaagtcagagaattagttactaagactggtattccatttttgccgatgtcaatggctaaaggcgttgtaccagatgactcaccatcatcagctgcttcagctcgttcatttactttaggtcaagccgatgtagtcttattaatcggtgctcggcttaattggatgctttcaaatggtgaggctccattgtttaatgaagacgctaagtttgttcaagtcgatattgacgcaacagaatttgattcaaacagaaagatcgatgccccattacaaggtgacattacttctgttttacaaaaattaaacgcaccccttgaaaaagctaacgttaaggcccctcaagactggctagattcaattaagaatgcctgtgaagctaacaatgaaaaatttgctaaaagaatcgctgattctgaagctaagccaactttaggcttctacagtgcaattgaacctatcaataacttgatgcaaaagcaccctgacacttacatcgtaagtgagggtgccaacactttggacattggtcgtaacttaatcggtatgcaaaagcctcgtcaccgtcttgatactggtacttggggcgtaatgggtgtcggcctaggttatgccattgctgcagctgttgaaactggtaagaaagtcatctcacttcatggtgactcagcctttggtttggacggaatggaaatggaaattatctgccgttaccacttacctgttaccgttgtcatcattaacaatggtggtatctacaatggtgaccgtaacccagttaaagaccaattaggacctactgttttaagccacaatgctcactatgctgaaatcgctaaggcctttggtggtgacagctaccgtgtaagtaactacgctgaaatgaaggatgctcttgaaaaggcctacgaatcaggtaatccttcaattattgatgctcaaattcctgaatcaatgggtaaggaatctggtcacattggtaacttaaacccagaattagatttagcacaacttgaagataaggacaattaatcacgactgaagaaaatgaatatgcacctttaaaaggtattaaagttgttgactggacacaagttcaataaggtccatcatgtactcaacttttagcatggcttggtgctgaagttattaagattgaacgtactaacactggggaccctactagaaatgaattacttgatattcaagattcatggagtctttactacttgcaattgaacgccaacaagaagtctttgactttgaacatcaagactgatgaaggtaaaaagattatgtacgacttggctaagaaggctgatgtctttgttgaaaacattgcaccaggttcagctgatcgtaacggttttggttgggaaaagcttcacgctttgaacccaagattgatctatgcatcattgaagggcttcaatgaagattcacgttttgaaaacgttaaggcctttgaaccagttgctcaatctgctggtggtgctgcttctgctactggttggaacgaaggcaaagccaacgttcctactcaatcagctgctactttaggtgactcaaacccagggatgcaccttactattggtatcttagctgcccttcttcaacgtgaacacaccagtgaaggtatttttgtttaccagtcaatgcaagacgctgtattgaacctctgccgtatcaagttgcgtaaccaaatcatgttagacaacttaggtgcccttcctcactacgctgtttaccctaactggaaatggggcaaggcaattcctcgtgctgagaacactgaaggtggccaagttatcggtcggacttacaaggctaaaggttgggaaactaatcctcgctttgatggctggcacaaccgtcaattacacaaggaagaaatttacccattaattgaaagctacactaagcaatacgacaagtatgaattaactaagaagcttggtgctgctggtattcctgtaggtccagttcttgactggcacgaaattgaaaatggcccggacttgaacaaggatggtactatcgtaaccatcgaccaaggtggtaaccgtggtaagttcaagactattggtttgccattctcactttctaactacaagcgtgctccagatcttggtgaaaacaacaaggaaattttagcttcacttggttatgatccagatcaaatcgaaaaattgactgaagaaggcgtaatttctaaggctcaaggtcctaagaatccacgtactgaagttatcaagggtgaataattaatttattctcatcaaagtgtctgggaaaaaaatagcttccagatgaataaaaacgatcaagatttccttttttaagaatcttgatcgtttttttgttctctttaaaatttttaacaataaaaatcggcccttcagccaccttctttgacaatatttgttcaaattcatcatcataaaggcaattccgatatcggtttcgaccttctctttacctcgcaggtgcgttctgcgcatgccaaatacgttcttcaaatgtccgaaaactggctctacatcatattttctcatgccatagatgtgtctgccttcttcgctttggagaacttcttttgctttttcttttaaatattgccagttaggattatagcgaacttggcgctggcggccgctagctgttttagccaattgttccaattctggcgttagctggaactcgtctgcctcataaaccttaaaatcacggacctgaccagtagaacgatccttacgctggctgtaatatttgaaattgaatctgacgccatgatgatcaatgtaataatcatctttttcattgtagtaccagttgattagcttagttggatcattcttatactttctggtctgttctttttcatacatagtgtagggaataaagtacttcttgtctggatatttttcctccagcatcgaataattgtattcactgccatagccagcatcggcgacgattttgtcaaacttgtccaacacggtcatttgatccaaaaccggctccaaagttttgaaatctgtcggattaggaaagatggcataatcaactacatattgatcggtcgtgactgcttgaatattgtagccaggctttaattgaccatttttcatgtggtcttccttcatatgcataaaggtggcgtcatgatctgttttggaataactgttgcgtccggcaaagatctcttcggcttcttcatatttttgcattcttggcacataatcttttcttagccggtgcagaatcttttttagtccacgtcgcttggcttttcgaggtgaaccgccaggaatggctttgttttcctgctcaatctctttagtcagcttgttaatttctgcttcagtttcttgagctaattcctttagcccctgactagtttgaactttttctttttccatttctttgactacttctttagtaatcaattcatcataaagttcaactgcctggcctttcagcttttcatgatacttttcaaccgctttgcgccagacaaatgtatagcggttagcatcagcttcaatcttagtaccatcgataaaagcagcaccttcattgattaagccttcatcttctaacaggttagtgaagtagataaagctctttttaatcagttcattggcatggctgcttgatctaaaattattgatagtatgatatgaaatcttttgctggtcagccaagatcatcattggcagattttcttccagcatcaactcaatctttctgccagaaaaaactcttctggagtaagcaaaaagcagtattttgagcatcatggctggatgataggctgggcggcccgttttagcagtcttgcctactaaaacatcttctggaattgaatctacaaaccagctgatgacattagccaaatgattggccggaatggcaaaatctagattaagtgttaaagcagtttgacctgtgatataattcttgtacatgttagtttccaccttttttattttgtgatgatttaataatatcaaggctggagctaaaagtatacaaaaagagcgttgaaacaaaaattcaacgttcttttttcatgatctgagacttagttttttcccagacactttctttttaaaatagaaagcgcacaactatgacagaacctaattatgctgagctagaagcaaaaaacagtcatttagataaaaacaaaccttatcctttaagcgggatgctcgttattgactttacccacgtcctctcaggccctacttgtaccagaatgctcgcagatagtggtgcccgggtaattcatatcgaaagaaaaacaggcgatgacacgcgtcacatggggccatatatcgcagatggttctagcgaatactttagaatttgtaacgcaggcaaggaatcaatgtaagcgtcatataaccgagtatcttttttagtccgtatttttcaggtattctaatctcatcaatttaatggaggttaagaatatgatcgaaaaacaacaacccattgtggcacttggccgttcttctaaacctaagaaggctcgtccaccacgcaataatctgttgcttagtttaaagaagaatgacttagagctgaatttttacagcagcttagaccctgaaattatgaataagctgcttgagaaagtcttgccatgattaagctcagtgacttagggcaagtctatatcgtttgcggcaagacggatctgcgtaaaggcattgatggactagcaactttagtcaaagaacagtttgaacttgatccttttagcggcaaagtcttcctcttttgcggcggaagcaaggaccgcttcaaagccctttattgggacggacaaggtttttggctgctctacaaaagatttgaaaatggaaaattgaactggcccaggaatcaaaatgaagttcaagctttatcttctgagcaggtcgactggctaatgaagggcttcgcaatcaatccaaaaataaagaacacgaaagcgtgcgaattctactaacacttgacatcgcacgcttttttgatattcttttaactaataaatttaggaggaagtttaactcatgtcacaagaaaatttggaaaagattattgcacaacaagcaactactattcaaaacttaactgatgaaattaagctcctccgtgaacaagtagcttacttaacgcaaaaacgttatggcaaatcttcagaacaaatgcctttaaatggacaaacaagtctctttgatgaacctgatgctcaagatgacggagaacgtccccgacgccgccgttcagactattacttataaaagacaagctcacaaacgaaagcgtgctgacttactagctgcccttccagctgaagaggttcaccatgaattaggcgacaagcattgtcctgattgtcatcatgaactgattgagataggcaagcagtcagttcgccaagaattattgtttatcccagctcaacttaaaaggttagaccatatccaacatgcttacaaatgtaaatattgcagtcaaagaaatcttagcgacaagatcattaaagctgcagtacctaaagctcccctaaaccatggtctaggttcagcttcactcatcgctcattcactttatcaaaaatatgaaatgaaggtgccggactatcgtcaagaaagcgactggaagaagatgggactagaagtttcaagacagatgttaaattattgggatttgaaaagcagtcaatactactttaaaccagtgtatgatctgcttaagcaaaagctgttaatgcggccaattttacatgccgatgaaacttattatacagtcttagaaagtaaaacaatcaagacttactattgggtcttcctttcaggcaaacatgatcaatacgggattacactctatcatcatgatccttcccggagttgcaaggttgccttaaactttttaggaaactatcccggttatttgcactgtgatatgtggcaggcttatgagcaattgccgaaagcaactttagttggctgctgggctcatgttagaagaaagtttcacgaagccgtaccacaacaggcttctgaaaagtcccttgcccaaaaaggactcaactactgcaatcgcatgttttacttagaacaaacctgggagaatttgagcaaacaagaacgttaccagctaagacaagcaaagctcaagcctctgatgcaagagttcttcaactggtgtgagaaaaataaaatcaccgttttgccaggctctaaattgggaagagccattaattataccctcaagcatcaagctacttttgagcatgtcttgcttgatggcaatttagaattatctaacaataaggctgaacgcgctgtaaaatcactcgtcatgggccggaagaattggttattttctcaaagttttgagggtgctactgcaagtggctttattctaagcttaattgaaactgccaagagaaatggccttgatcctgaaaagtacttgaattatttgcttcagaaattaccgaatgaagagattctggattcggaaacccttgaagcttatttaccgtggcaagagaagatccagataaattgtaaataaaagaacttaaataaccgtctcagtataacagtaactgggacggtttttaagtacactattttatttgacgcttacgaatcaatcgccttagatttaaaagatcctaaggaccatgccttagtagaaaaaaatacctagaaataatcgttctaggtatttgatttaaaaagttattctatttaattcaacatgctcttagcatatggcaattcaagtgatggatcagcattcaaagtcaaatccgcaaattgaccattattataaagattatacgcagcagccccaatcattgcagcattatcaccacacaacttaatatctggcaaaatcaccttaggttggtctgctttaggcaacttagcaatttctgcactcatgcgatcacgtaagccatggttggcagctaccccaccacccatgataaaggtcttgggcttatattgcttaattgcgcgaattgttttatgagccaaaacatcaattactgctgcttgaaaacttgcagccagatcatacttattcaacttttcatgaatctgatcagcatgatgacaagtgttaataaaagctgactttaaacctgagaatgagaagtcatagtcatcatcttccatcattgctcgtgggaagttaaaggtatccttgccttcatgagcccaggcatcgatagttttacctgctggatagtttaccccaagaacacgaccaatcttatcgtatgcttcgccagtagcatcatcgcgcgtatcaccgataatttcaaaatgaacaggatccttaagtaaaactatttcagtatgtccacctgaaacctgtaatgcaagagctggatattcaatctcatcttttagttgagctgccataatgtgccccataatatgatcaacaccaatcaaaggaatacccgttgccattgaagcagccttagctgcacttacaccaattaaaagagcaccaactaagccagggccataagtcacagcaattgcatcgatatctttccaagtacaattagcttcagccaaagcttctttagtaatctgactaaccacttcaatatgatgacgactagcaacttcagggactacaccaccaaagcgttgatgactcttaatctgcgttgctacgattaagctttcaatctcacgcccatttttaatgacagcagtggaagtttcatcacaagaactctcataagctaaaatgcgaacatttttttcactcaaaacgtaaacttctttcttttaatctgatgtggttttaaccataaaaccatgttcatagcatcggtatgagtatcatggtaatagtttttacgaatgaaggtaccttcaaaacctaaggaacgatatagcttttgggcaatctcattatctactcttacctctagactaacgcaatcactgtcattttcacgcgcccgatcaataatcaattgcattaagtaacgaccaatatgcatattttgaaaagccggcgctactgcaatattagtaatatgcgtctcttctggagtaaaacgcgcaccaataaatgcaactagcatcgattcataatacactaccaaataaagacaattatgccgcttctctagttctcgctcaaatgaaaacttattccacggtgtccgacctgaataaacttgctcctctaatacaagcaggtcaggaatattgtcatctgtagcttgcataatttgtagtctcttaccgtttacattcgcaataaacggggtaaaactcatatcaatccgatttaactgttgatggaaaaattgattaaacttcttcaacataatgactatctggctcgaatggtttgcctgtctttttatgccagtctacttcagcctgagttcgacgcaagtaacgtggcaataatttatctggatcaactggaaccgcattttcagctaattgtccaattagcccagcatggatgacattctcttcttcagttccataaacatatggaatattcaaagctttaaatttttcatcttgcttttcaagacctgagcccacaaaaacaattttcttaacttcatgcttggccgcataatcttgaatcgccttaattaaaacgtcgatattgtaatgaccgtctggaatgacattctctggtacagcaccgcttaaataaccggccgcaaaataattgtcatttcttgcatctaaaccagtaattaccaaagcgtcttcttgaacgcctttagccaaagcttgtaaagttgagattcctacaacctctttatctaaaatgctggcaaacatcttaacagtagtgattccaattcttagtccagtataagaacctggcccaatagcaactgcaaaacgatcaatatcttttaagcttaaatcattatcttttaagatttcatcaatccaaggatcaagatgttcgctatgattacgctcatctcgttcatttttctcaacaataatttgttgaccatcattcaaggccacgctcaaatgattagtagctgtcgaaacacttaaaattttcattttatacatttttctcttttcgctttaaatcacttttttattttaacacgagaaacggcttgtaaaacaaagtagctgataaccatttgaatccaaggaacgatcatctccttaggtaaacgttggatcaaagccgcattgaaattgataccatacataatatgtagccataaggtattcatgccaatattgacaattacagtcaccagaatagtagaagcaataatccgccaaattttaactggcttattatataaaaacagggcgtagataaatgggcctgccattgctgttaaagtaaaaccaatgaaaaagccaccttgatcgccaaaaagtgcagatgaaattaaatcactaattccaccgccaattgttccccagagcggaccaaagagatatcctaatagcacactcccaatgaaacccagtcccactttaaccattactggaccaaaagaaaactgacttagaataattttcattgcaacaacaatacctaaaaagactagttgctgtaaatccgttcgtaaaattttctttgtattcatttgaccgattcctcccctaaataaaaacaactaatagcgtcatgttgttactatatctcacgccaacttaattcacagacggccttaactgtcccatcttctgcttcaattgcatgagatgtaataataatatcatattgaaccaagtccatgcaagaatttatactctcaccataatgaacttctttatcaaatttaatatcaattgctgtaacaatatgttcttttaaaaagttacgatccaacatatcaacaaaccaactgaaataatgactattagttacatgatgattagtatctaagtcatcgtaacgcgcacggtatgaacgcttttgctcgtattcggtttgcggacgcaatcttggaaaacgtggcatctttttaagtagtggtgcaccccaatcttccatcattttagtatcggttggcaccatatgccgcttcttcaagtcgagcattacccactggctttttacagtcactaatggcttaccgtcttgcgtactaacgccaaaatcacgatactcaaaaaaacgattatagccgctagcttcagtacttagaataacttgatcacccggtttaggcaggtctttaatctcaaaatgatattgagtaacgacccagcctagaccacgcttaaccaagtcatcagtcccagcaccaccttgacttaattgatgctcagaaacctgcatcattaactcaactagtgctggtaattttaaacgccgattttcgtcacaatctttaaattcaatttgatattcttcggtatacttcataattaatcctggtgatattgatcatacaattcattcttagaaacatgatgctgcttggctacctgtttaattgcatctttcttggattcacctttttcaaccaagtcattaactaagtcaattaattctgtccaagatagttgctgaggcgcttctgtattaggtgaaactagaatcacaaattccccgcgtggagcattctcattgaagtaattcgtaacttcttccacactaccccggataaactcttcgtggattttggtcagttcacgtgcagctacaatttgacgatcttttggcagcacactagccaatgttttgaggttttttgctagacgatgcggggcttcataaaaaattgatgttgctctattatcgcgcatctgtgcaaaataggtcttctgttccgatgattttcttggtaaaaagccataataagtaaatggctgattaaaaccggaagcaatcaaagcagttgaaaaagcatttggaccaggaagtggtacaaccggaatatcatgcttaatgcattcttgtactaatacataacctgggtcagaaatcacgggcatccccgcgtcactaatctcggcaatcacagcaccttccttcatcaacttgatcaattccggcgcccgctccttggaattatacttatgaaaagagatcattttattatgaaccccaattttttccagtaaaatcccactagttcttgtatcttctgcggctacataatctgcatcggttaaaacttttttagcgcgaatagtaatatcttccaagttaccaatcggagttggcactaaataaagctttccttcatcttttgcataactgctttgacgtttcattatctaccgtcctttttcttgccctttttttcgccaaaattgtccaaaatatcaagacaaaacatacaatctgcacttggatcacgatgcgagccatagtacatattgcaaatgtggtaccctgaatcataaatcttcttcaatgattccaagccactctgcgttttagtctcaggtgcaggctgatttgccgttaacttgtccagcttctcatggagtaattgattttctaccttcaactccgtgttttcttttaatgtttctaaaatatcattttccaagctggcaatcgtcttggtcatattttctgttgtttcttcaatctttttcagttttgaatatggatccaatctaaacacctacttccattttaaggcgagataatctaacgcattttgtaaatttacgttactcaaacgcattttgtctatttcaattaaattcttaagcattgtcgccgccattattcttttagcaggattacgcaaatcttgctcggccaataattttaactgaagcaagatgtaaccctgctctgacactagcttagcatcagcagctagcttatgtgcactgacaagtgctaagctgttgtgttccagcatttcttgataaaaatatttaattgcctgattccatttatcaagattacccagttcctcaatctctgcttttgaaaaaccattctccagtaagactgcagtcctaccactagccctctcaccattgtcaaaattaatgatctgggtccgtgaacgcaccgttggtaaaatctgatcactattgttagtaatcaaaatcgtaactactggcgctactggttcttctagtaagtttaataaaccgtttgctgcagctaaagttaacttttgtgcttcattaataaagaagaaacggcgagtactttcaactgggcttttggctaattcttcttttaagggacgaatttgatcaatccctagagcctgttttccatcaggcgctactagcaatacatctgggtggttacctgacaaaatttgccgacaattttgacagctgccatccggcttattttcaccagtacaattaaacaaacaagctagccagtatgcagtattcaatgcccgtgcctcatcgctatcaacaaaaagataactatgagctaactttttttggtcatatgctctttttaaaaattgggtttgctttttcccaacattactaagatcaatcatcagaagcgtttaaactcatcaactggaacaacaaaacaagttgcaccaccgactgtcactttcaaaggctgtgtaatttcatacccagttgaaaccatatgtggtgttgcaatttcctctcttgctcgggactgttccttaataatctttaatacatcgtctactttatcgtcatcacaacctactaaaaaggtagtatttccttgacttaaaaaaccacctgaagttgctaacttagtagcacgaaaatcattttgaacaaaggcccgttgtaaatcattagagtcttctttttgcacaattgcaattactaacttcatctaaatcaatccttaaaataactctggcattctttgctttaatgttgcaataacttgagcaactacctgatcaattggctgcgtagcatcaacagttacgaagcgttcaggatacgtctcttttaccttgagaaaaccggcataaacctttttatgaaaggcaagattctcttgttccaaacgatcttcctgacccggacgcagcttttcaattcgttttaaccctacttcaggatcaagatctaagaaaaaagtaagatcaggatctaatttatccgttgcaaaatcattaatttgcttaacttcctgaattcctaaatcacgtcccgctccttgataagctaaagaactatcgacatagcgatctgaaaatacgactttgccttcctttaaagctggacgaataatctcctccacatgctgactacgtgatgcagcatataaaagcgcttcggtcttattgtccatcttgtcgttagcaggatctaaaataatgtcgcgaattttttctgcaatttttgaaccgcctggttcacgcgtcacaagatattgtgtcttaagctctgaaccaatttggttcaatacttcttttaaaactgtacttttcccggcgccatcagggccttcaaaactaacaaaataacctctcataaaatcctccatatgtctattctacagaagtttcatagagattaacagtcctactattttttatttattcaaaataaaaaaagaccaatattcggtctttttctactgggtaatagcattagtaataccactaaatcttgtgcctcgatgacgagcttcattatacaaaaaagtatactttgcctttaagattcgattttgcacataattatcttcggataaatctaaagttgtttgatcgagatcttgctctaatgcaatttgattttgtagcttttcaatctcggctaccaacttttgatcacccattgctttgatctttgcttgctttttattagccattataatgccgttcttccttgcactgcgcgctttaaagtaatggaattagcatattcaatgtcactaccaactgacaaaccagcggccaatctggttaccttaataccagctggcttaattaatttgctgatatacatcgcagttgattcgccttctggagttgaattaagcgccaaaatcacttctttaacagcatcatttttttgcaaacgcgtaattaaagacttgatattgatctcttctggtccaattccatccattggtgaaagaacaccatgaagcacgtgataaagtccgtcatattcgcccatttcctcaaaagccatcaaatcctttggttgttcaactaccataatagttgtttgatcgcgattaggattagagcaaatatcacagacatctttttcggtaatattgccacagatcggacattgatgaatgtctttttttacttgaactaaagacttagcaaaatcatcgacatcctgatcaggcatatccatcgtataaaaagccaaccgagtcgccgttttttcaccgattccaggtagcttcatataagcatcaattaaatgagcaattggtaatggatattgcaattacatcaaacctttcgtgtatttacctaagcttgcctgagttgcctcatcaattttggtcaagcccttgttaaccgcatcaattaccaaatcttgtaacatatctgggtcgtctggatcaattgcttccttatcaatcttgatgtccttcaacttgcggtcaccagtaaaggtagctactactaaatcatcggcagacttaccagtaaattcttgagcagtaatgttttcctgctcttctgccatttgtgcttgcaacttcttagcttgcttcatcatttgttgcatgttcatgccgcccatgcccataccaccaaaattaggtcttctactcataatttttctcctttattattctattatactaataatctgcttatcaaaattgtcgtctttctctagtttaacttgtttatcatcaaaattaaactcagcagtatgcttatgcggtatcttcaccttattagttacgcccattttcatccattcatattctgaatcgatgtgccctatatcaatcatttgattattaagctgagctatcaaatcagccacaatcacttttgcagtaggacctaacatcagtaaaatcaacctattagctgcatttttaataatttcatcttcaataacttttttgcgactatatgcattagttggcggacaaatgagtctactaattgatctagcattagaaaacaagtcatgccttcgcctgagcgactatatttaccttctacaattaaaagatcatgatcctgccaaagctgtttcattttagcaaaataatctttagcgtgacttttatctactaaatcaatatatggccgtgaaaagaaagtagaaacgtatacattgtattgcaattcaacttctcttaacaagtcatgattattcgggaagaaactattttgataaaaattacggcaataatcattatagcgatctaacttttcaaaaacatcagataatcctactaataaacggcgattgctgccttctaacaggagctcttttagcgaaccagctaattccggttgataatcttgatacggaatacttgctcctctaattaaatctaattctccatctccaaaacgaatcaaagaattatgatcttctagtaagatctgtaatgttgtttctttatttaaaactttaatattataatcattgctcatagtactttagtctttaatattgactgcatccccaaaaagatcctttgccttattaatcacttctggatcaacttctggttcatctgactttttttcttgaatctcaatctgttgctttttcttagcaagtagctcatccttatggctttcaacaaattcttttctaactgccagccaatcgttatctggcaccaaaacaatgccgtaagaatgtttagcaaacttttcaatatagtctgttaagcgccctaacagatcattatctgcgctcgcattttcaaaccataaagtatatttgcatttcatgacaacttgtttaggactagcagccactggttctaatacatcaagcagtgctttttcagagacagctaaaacagattgtaaatcaggccagacattcttaattgtctctaaatcgtttcgagtagcattttcaagaacatgatatacttgtttgcgattttctgccgtagtttttttgacttttctaaccggctttttagtttgcttctcttttggtttaacagcaggcttaggagccactttaggtaccgcagtatccaagtgaaatacctgatttgttgataaacttggcttattggatacttcactaagtttttgtgttaaatcaacgacttgcttcttcagcgctgctagttcagcctgcaaatcagtattaccttgtgcaggttgagctggtgttgtcttagctggggcagcgcttgtctgcactggtgcagtactacttgcttctactaagaacacttccagtggtatctgttgctgattagtatagcgtaaatcattcaaggcattattagccaaattaatcaatcgataataactatctgtagaaacgctctttattttttcaataaagtcttttgttaaaaaagtttcctgtttattttcatcggttttgacgattaataaactcttagtagttagatcgatgatttcatctaaaatgttttttgaactagctcctttagccaactcatcttgtgtaaactgcaaggcttgacctgcatcctgatttaacaaagctaaaagaattttttcaatattttctcgatctgcaaagcctgtaatctgcaaagcatcatcatagttgacgctttccttctcgtaactcaacagttgatccaaaatgctaagagcatcccgcatcccaccatcggctacttgagcaatgactgctaaagctttatcttcatatttaatattttcttgatcaagaatgtatttcattctcttctcaaggtcttctttggaaattcgcttaaaattatagcgctgcgttctagaaataattgtcgcaggcactttttgcaattcagtcgttgctaaaataaatactacatgctctggtggctcttctaatgtcttcagcaaagcattaaaagctcccatcgacaacatatgaacttcgtcgatgatatataccttgtatttaccttccgttggagcatattttaccttatcgcgaatttcacgaatttcatcaaccccattatttgaagcggcatcaatttccatgatatctggcattgaaccttgatcagctgcaatacagttagcacactcattgcatggttcgccatcttgcaaattagtacaattcaatgccttagcaaaaatcttagcacaagatgttttaccagttccgcggggtcctgcgaaaagaaacgcatgggaaaccttaccacgtttaatcgcattttttaaggtatcggtaatcgcttcttgaccaatcacactgtcaaaagtccgcggccgccacttacgatatagcgcttgataagccataaattctctttcctaagtaaaaaagctcctagctctcgaagagctaagagctgttaatattctaacaaaaaaggcacatgcctgaacaaccttagtgctgctaccttccggtcctgacacaattcagaggtcaaacattgcccaacaactatgttaacgtatttcagtaaatattaccagcatcttgttttaaaaattactgattttatacttctttttgagctaatttagctgctttttgtttctcacgaatcgctctgaaaaaatcttttagcatttgtgcacattgatcacgatacagtccacgaattgcatgcggatgatgattaaatttttctacgctaaataaatccacaactgatccacaagctccggcttttggatcaagtgcaccgaaataaacgtcttttattctagaattaataattgcccctgcacacatcgggcatggttccaaagtcacgaataagctgcagtcaattaagcgccacatgcctaacttactgcaagcttctttaatcgcaatcatttctgcatgttgggtagcatcttcatcaagttcacgcctgttatatccagtaccaactacgcggccatcaggatcaacaacaactgcccctatcggcacctctccttgcttttcagcttcttttgcctggtcaatggctaattgcatgtatttccttttatcttcgccagacagcattttatcacttctcaattcatcgtttttatttattgtatcaaaaaagcagctatttgcgactagctgcttactttttacaatggttcaatgttacgatttctaaagttgtggtagaaaaagattcctgacaagatcaagtataatgcagcaattccagctggagcagcagtctcgttatcaccggaaatcatacctaacataaacacaccaacaattacaatcaatactgcaacaatgtatttccaagcctttttcataataattatcctcttcacatactcttgatatttacaagattattatacgaggataaatccagttttgaaagcacttttataaagtctaatgcttatttaatagtactttcaagcattttttatttagttatttcttagttgattttaagatataatagcctttatctcttgttaaaatttcacaattaccatatgtattggtcatcagcttacgcgcactaggttctccctgctttttctgaataactactaataagataccgccattaaccaaatgctcatttgctcccagtaaaatctcattaaccactttttttcctgctctaataggcggatttgttaatattagaccaaactttttatcattatccacatgttcataacaatcagaggaatacgcgtggtgctagttaaatcgttttagttaataaaaaagtccaatcttgttagactcaacttgtataataatagaaaagagcctgatctgattgaactgccttaagcttaagcgttttagccaccatttacaagttagttttaaagatttagtgataatttgtcggcactggtatcgtttgtatgcaccggctgagtttactcatcggcgaaatattgatcaaattaaaactacggacagtctgattttggctttacttatctggcaagctaagacaggaattgaatcacaaagaagattctgtgaatgtttcaattgtttatcacactcacgttttaatcggcgttcacgtcagctattgcaattgatttatcagatacggcaagaaatgaataaaaaggttgacctgaatggacatttcttgatcattgacagctttccggtacctgtttgccaaccaattcgcaactatcgtgctaaaatttttcgcggttatgccaacattggttataaggccaccaagaaaatttacttctatggtttcaaagttcatgccattgttagcgatgacggttacattcttgattatgtcgtaacaaaagcatcagttcatgatgccaaggagacagttgaactgctggaaaatgcccatccatctaattactatcttcttggcgacgaaggctatttaggcaaagaactgcatcaacagctaaaacaaatgggttatgaactttggacaccatatcgtaaaaatatgacaggagctaaaaagcacaatgatcatcaattgatggctattcgcagaacaattgaaagcgacttttcgcttctgacctattacaatgccgagaacaatcgagcacgtagtctgataggctttcaaagccggttggaaattgtaattttagcttataatttggcttattgtctagaacgatttaactagcaccacgcgtagaggaatagatatttacattatctatgtgattaacttgtgcattctgctttgccaagcttaatccacgctcatttacatcaaccatatctacagtttgatcaggccaaaacttagccgcaaataaaccaatcggaccataaccggtaccaacatccaagatattatccttaggaaaaacaacatctttcattgccttgatcaatacgcctgagccataatcaaccctcattttagaaaagacacctgcgtctgttgtgaatttcaaatcaatattatccacatgataatcaacaacatgttgatcatgcttggcagtaggatcagtcgcaaaatacatttgatttttttcttcactcattttaactaacctttctttttctcaaaccattcttttatcttatgcagctccgttgtattctgtacatctttcaattcattaatctgtgcttgcatctttttgttttgatcagccaaatccttgttttgcttttctaaattatcaagctttttcaaaattaattgaatattatcatgcgtttttaacgtattcgcgccattcgttctcctcatcaaatacgaagtaatcgatgacgttaacataccaactattccaattcctaaaagcatcattactaatgtaacgaattttcctacaatactatgcggtggaattgttttgccaaaaattgcatcataaccgacagtagaagctgttgaaatgacccaccaaaaagcagtatccagcgttacatgttcagtgattgcgaatgcttccgctcctaccaacaaaaatgtaattgtaaaaaagattacatagagtaggccattagtatgaaaaatattacgtaattttcccatcaaaccagctaatcgaatcaaacgcaaatgccgcaaatctgataccagcccagataaattaaaaatatttaagctgataaacaataaccccattggaataatactcagcaagtcataaatgtgagttttgaaatatagtttcttgtcttctgctgcatgtaagccacgaaaataatcaattgcaaaatatactacaattgcactattgatccagaaccatttactagtcggttcatcaatattaataaccgcagcaaaatctaaaataatcaaaaaaatcgaaataatagctaaaatggccattacccattgatatggcgttagtcttctttctatatctttcatcataaatttaattatacaaaaaaataagctcttcgcacatagcaaagagcttattcatagttgcccagttgggctgtaactatttaagggttacagtagcaccaacttcttcaagcttagccttgatgtcgttagcttcgtcttctgaaacgccttccttaacgttcttaggagcaccatcaacaaggtcctttgagtccttaaggccaagaccagtaatgtcacgaactgccttaataaccttaaccttttcttgacctgcttcagtcaattcaacgtcgaattctgacttagcagcacctgcgtctgcagcacctgcagcagcaactggagcagcagcagtaacgtcaaattcgtcttcaatagcctttacaaggtcgttcaattcaaggatggtagcacccttcaattcttcaataatcttatcagtatctaaagccatttaagtatcctccgaaaaattagaatttagatattaaatataaatttctttattattcagctgagtcttcatccttagattcagcaacagccttaacagcatatgcaaagtcgcgtacaggagcttgtaatacagaaacaagcattgaaagcaaaccttcgcggcctgggatagcagcaagttccttgatttcatccttagaagtcaacttaccttcaagcataccacccttaatttcgataacgtcaaagtcatcttcgtacttagaaacgatacgtgcaggttcagtaacgtcatcagcgttatcagtgtagataacagcagttggtccaacaaaagtatcatcaagaccttcgataccagccttagcagcagcacgtcttaagtaggtgttcttgataaccttcatcttaacatcgttatcacgaagttccttacgcatgttagtaacttcttcaacagtcaaaccaaggtagttaattaccaagattgccttagcagctttaagttcttcagcaaatgcatcaacgaacttttctttttcagcaatagcagctttactcaaattatttcacctccatgatcacattgataaattctataaggccttaaaaaagcaaaaactccatgccgaaagacatggagcataaaaatcttcatcatcttctggcctcggcgggattttgaggcgtcatgccacccgagtcttaggtagaatttacagttaattattatagcaagctttgctgtaaaatgcaaaagataattttatttattttggttattgatgatttcattaattttatccaccatctcgtcaacttgatcattgccaaaaacagtgtagtttgagtaagtattgttttgatctgctatatccccaaaagacaaaattggaatattacgttccttaacttgatcaattatctgataaactttatcaccgtagttaatgtccaaataagcatctactgtcttgattaagcgtttctgtttttcaccaataattgtttggtataacgccaatacagtttttgaaatattcattaattatacgcgtggtgctagttaaatcgttttagttaataaaagttgtaggtaatttaaatagaaaagagtctgatctaattgaactatctcaagcttaagcgtttttctcaccatttacaagttagttttaatcggttaaatgtgatttgtcgctcgctatataagctttatgcgcctgatggacttaaacatcgtaaaaatgttgatcagaccaagcttcctgatagttctatcttagcgatgctcatttggcaaactgaaattggaattgaatctcaacgaagattctgtaaattcttcgttggcttatctcattctcgttttaaccgtcgagctcgaatgctcttgcctctaattcgttgtatccgtcaggcttggaatcaagaagtaaagacagctggagaatttttgattattgatagtttcccagtgccagtttgccagcctgtttgcaattatcgtgtcaagatctttcggggcgtagctgatattggttataaagcaaccaagaaagtctattattatggcttcaaggtccacgcaatagtaagcgatgatggcaattagaaaaagcattgaaagcgacttttctttgcttagttattacaacgctgagaataatcgagcaagaagtccagtaggctttcaacagcggctagaaatagctattttagcttataatatggcatattgtctagaacgatttaactagcaccacgcgtatcaactgttttttattacaaaaaaagcaccgctttttacggtactttatttaaatcgtttcactttcagttgaattagatagttcttctagttcacccgtagttttataaaccacccagctagccaagttaacaatgtggtcaccgattcgttcaagtaaacgggtaactacaaaatagcttgatgaagccattgcacgcgaaggatcatcttcaattccatcaacgatcaattgacgagctcttacatagtcgtggtcaatcatgctatcacgactagccacttcacgtgccattttttcatcatcttgcacgtaagcagttaaaacttgaattaacatatgtcgcacattatgtgtcatattagaaataatttcttcaacttctggaatacgaggattaccttttactctgattgtttccagagcaatactcatagcattttcaccaattcgctccaagtcagtagtggcctttaaaatactgataacaactctaaaatcagtagctaccggttgctgcaaggccattaattttaaggcttgcttttgaatattaattgattctgtaggaatcttttcttcatcatcaaccattgactgcgcagtctttttatcatgatcaacaaaagcacgggtagcatggtcaatatcatcgttgacgaggacacccatttccataaattgtgtatttaattttttcagttcatccaaaaatatttcgtgcatctttttacctcaaaattttaaccaaaacgaccgttaagataatcacttgtgatttgtttcttaggtgcaataaacatttcttcagttggaccagcttcaatcaaatcgccattcatcaaaaaggcggtctgatcagaaattcgtcctgcttgctgcaaattgtgagtcaccataataaaagtatactgatgctttagttccatcagtgtctcttcaatctcactacttgaaattgggtcaagcgcacttgtgggctcatctaataaaacaactttaggtctaacagccaacgcacgagcaatacaaattctttgctgctgtcctcctgaaaatgcttgagcgtttctagttaaattgtcctttgtttctttccaaatagcagcttgcttaagactctcttctacccgctgatcaattagctctttgtctttaacaccagcaatttttaagccataagccacattgtcatatacggaaaacgggaatggggttggctgttgaaaaaccatgccgacttctttacgtagactgaccaaatccattttagaattatagatatcttggccttcaaacttgatttcacctgtgatattaatgttttcgatgtcatcgttcattcgattaagacagcgtaaaaaagtagatttaccacaaccacttggaccgatcaaagctgttaattcttttttcttaaaatcaagactgatcccgtgcagtgcttcataattgccataacttagatgtacatcttttgctgaaattattgttgtcattttatccaaaacttccctgaatatagttttcagtaatcttacccttaggattagtaaagatctctgccgttgaattatattcaattgcatgtcctaaatggaagaatgcagtataatcactaattcttgaggcttgctgcatgttgtgagttaccataatcatagtatacttactcctcaactgcttaagggtatcttccagtttagaagtagaaacaggatccaaagcgctggcaggttcgtccagtagtaaaatttctggcttaacagctaaagcacgagcaatgcataaacgctgttgttgaccacccgacaatgctaatgcacttttatccagcttatctttaacttcatcccataaagcagccgcacgcaaactttcttctacaactcgatcaagttctgcccgatccttatgtccatctgccttcaaagcataaacaatattttctctaattgatttaggaaatggattaggccgctgaaaaaccatgccaatgttttttcttaattcataaacattgatattaggcttattcacatctaaaccatgaaaccagatttttccgttaacagttgctactcgatcattcattcgatttaatgaacgtaaaaatgttgatttacctgaacccgaagcaccgatcaaagctgtaatcgtgttctttttaaattgaagactggcatcaaataatttttgtaccttaccgccataaagaacacttaaatcttcagttgataattccaaatcatcatttgcaaaagttttaatatagctaggttttaaatcttgcattatttcacctacttagctgcagttaacttgcggtacaatttattgcctaaataacgtgcacctaaattaaatacgattaccacaataaccaagagcgctgaagtagctgctgaaacaatcgtggcatcaggaataattccttcagtatttactttccaaatgtggaccgccaatgtttcggctggccgcattacattaagtggactagttggactaaatggattccagtccgcataattgactgttgatccactttgtcccgctgtatagatcaaagcggcagcttccccgaagattcggcccgcactcaaaataattccagttaaaattccgggaagagcagcgggtaaaacaatcccgcgaatagttttccaattagataatcctaaagccaatcctgcttcacgttgatcttgtgggacgcccttgattgcttcttcaatattgctagttaaaattggcaaattaaaaaaggtcaaagctaaagcaccagaaataattgaaaaaccaaagccaaattgaactacaaacaataaataacccaataagccaactacaattgatggtaatgaactaagaatttgaattgtagttctaatcaaattggtcacccaattatctttagcatattctgctagataaattgctgctcctaaagcaattggtaaggagataatagtagtcaaaattaacaaataaattgaattgaaaagttgatcacgtaccccaccaccagcttggtatgatgaggcttcagaactcaaaaagcgccaggacaaatgtggaatacctgtaatcaagatatcacctaggataccggccaaaattaatacaacaattcctaccaaaatatagataatcgccgtagctaatttatctttcttttttgcatccatattacttttgtcccttctttccaattaacttaactaggaaattaaataccaaagacataattaaaagcaataatgctaatgaccataatgcattgtttggcaaagttcccatgaccgtatttcccatttgactagttaattggctagttaatgttgctgatggactgaccaaattgtatggcatcaagacggcattaccgataaccatttgtacggctaaagcttcaccgaaggcccttgccattccgaagattaccgccgtcaaaattctaggcgtagcaactcgcaaaacaacatgataaatagtctgccaatgcgtagaacctaaggccattgaagcttttctaaaatgacttggtacagcctttaagctatcaaccgttaatgatgtgattgttggtaaaaccataacgaacaacaccaacgtagctgctaaaataccaaaacctgttccaccaaatagttttctaatcacaggcacgatgatagttaatcccaagaaaccataaactacagacggaattccaactaataattcagtcactgactgtaagaaattggcaccctttttagatgaatattcagtcatataaagagctattgcaattgcaaacggggtggctaccaatgctgctaaaagagttactaagaacgaagtaacgatcattaccgcagcaccaacatgattcttgccctcacccgggtcccaatcagttgaagtcaaaaagtgaatgacattaacatgatcgctgacaaaagtagccaagccgtgatagccgacaaagccgataattgagacaactaagacaataatcaaaacaattgccaagtaagttaaacccttgccccaatattcttgatgagtctctttagatggcttggttaatttatcaatatcaacactagtcggacccatcttttttaatttaacgtgtggaacgtgttgactagcaattgcttgatcaacaacttcctttaatttatccttcttatccatgaactattttcctatttgtgtaacttgattcttgctattacgagttactttcatttcattgatactgaggtacccaatcttaggtacaagatctttttgtactttttcacctaacatataattaataaacgctttagtttgtttgttgggcttacccttagtgtacatgtgctcataacaccaaatattccacttattagtagtaatatttttgttagttggctttaccccattaatactcaacttttgaatattggtatcatgagcataaggaaaggacaagtaactaatcgtaccaggcgttgaattaacaatctttttaacggcaccgttagagtcctgttcttgcgacttaactggttttgttccttgtaaaattatatcttcgaaagcagatctagtaccacttcccttagaacgattgatcacagttatggcttcatttttgccacctagttgcttccaattcgttaatttaccagtgaagatctgtttcaattgcttttgcgaaacatttttcacacctacacccttattaacaattggaacaataccaactactgcaattttataatcacgaagtttcttggcatcaattcccttttgtgtttcggcaaaaacatcagaggttccaatctggactgcaccagcttgaacctggctcaatcctgtacctgatcctccaccctgcacgacaatgttgctgtcttgatgacttaagcgataatcattacctgcttgttctgctaaaagctgcattgcacttgaaccaacaatagtgattttagaaccattattagcacagcccgtaacaaaagctagcattagcaccaacataatgactagttttccaatagaatgctttttcatgacattatccttaatatatagatttgtaagttcaatttatgataccatgttcgaaaataataggtcaatgaatagaaaaaagcctcgcaatagcgaggcttttaatagtctattttaaattagtccaagtttaatggatcaagcttgatccctgggccaaaggttgctgaaacagcaacactcttaatgtattgacccttagctgaagctggacgagcacgtaagataacgtcgcgtaatgcgtcaaagttttcaactaattggtcttcagtgaatgataccttaccaataggagtgtgaatagctgcttggcggtcaacacggtattcaacttgaccagccttaacattcttaacagccttttcgatatccatggtaacagtaccagtcttagggttaggcattaagcccttaggtccaagaatacgacctaaacgacctaccttagccatcatcattggagtagctactacaacgtcaaagtctaaccagccgccttggatcttttctaccaagtcatctgagccaacaaagtcagcacctgcagccttagcttgatcagcttgtgggccttcagcaaatactacaacggtttgggtcttaccggtaccatttggtaaaacgatagaaccacgaatttgttggtcagcttgcttaggatctacgcttaagttgtaagctacatcaacagtagcatcaaagtttgcgtatgaagtttccttaacaagtttcatagcttctgctactgagtataatttatttgagtctaccttcttggcagcatctaaatatttcttaccatgctttggcatgtgatttcctccttgtatatgtggtcaaacgagcttctcttaactctcccacctaatttgttacctaaataacaggattagtcttcgacttcgatacccatacttctagcggtaccttcaaccatgcgcatagcagcttcaatatcagcagcgttaaggtctttcatcttagtctcggcaatttccttaacttggtccttggttaccttaccaaccttcttggtattaggttcaccagaagccttttggatcttagcagcttgctttaaaagaactggtgctggtggagtcttagtaatgaattcgaatgaacgatcttcatatacagtaataactacagggataatcatgcccttttggtcagcggttctagcattgaagtccttagtaaaaccaacaatgttaataccagcttgacccaatgcaggaccaactggaggtgctggggtagcagcgccagctgggatttgtaacttaactacgttaataactttctttgccacggtcaaaacctccttgattccgtgatgcggttaaaatggagaattttccttttttctcctcccacaataataaacgtaccgtattagaataacatcgtttgggtacaattacaactaaaaattctaaatattattcgttttcgtcaagcttcttaacttgatcataatcaagttcagcagtagtcgcacgaccaaacatgtcaactgatacgtataatttgtacttatctggttgaatatcagtaatcttacctaccatgccattaaatgcaccttcagtaatagttactgattcgccaatatcaaagttaactactggtttcttagcaggttgaccttgattcttaagcaaacgcgttacttcttcatcaagaagtggtgatggcttagagccaccaccgtgtgagccaacgaacccagttacattaggtgtgtttctaacgatgaaccaactttcatcagtcattaccatttcaactaaaacatatcctgggaaaatcttttcttcaatttcttgtttcttgccgcgaacggtttctactttttcttcttctggaaccattacacggaaaatgtagtcttgcatccccatgctttgtgcacgtgacaacaagtctgacttaaccttgtcttcatagcctgaataagtatgcaaaacgtaccatttcttttgtgttgtttcgaccatatttttctccttaaattttaggtaaacaaaaaaacctcccacagaggttttcttttagctgtcaatattatagcatgaatcgctgataatttctaattatgctagcaattacattaatctttgagtcaaccaagtgaagagccagtcaagtgcacctaaatatgccgcaaataaaattgaactagtaataacagttgctgtatcacgtctattttgctttgcggatggccatttaaccaatttcatttcatgaccaacactcttaaaaaacttaatcattagctttatttacctcgtttccttatgcaatgttttcttaccgcaatgtttgcaaaacttttgaagttcaagtcgctgagtgcgattcttacttgcggtgattgagtagttgcgtgacccacaaacactgcaggctaaggctgcttttttcactgccataatctcacttccaaacttttataaaaacacatacttactcagtattttatactgttgtcccttcctacgtcaataatctgatttacattactaaaagtaatcgagctcaattacaactaaatatttttattttgatttttgcttatctataataagtgtaactacttgttagaaaggacataataataaataaacatcctgaatatctattgaataaaatttctggtcctgctgatttaaaaaaattatctcttccagaaatggaaaagttagccagtgaaattaggactctaatcttagaaaaagatgccgctgaaggtggtcacctaggtcccgacttaggaatcgttgaagctacaattgcttatcactatgtttttgatgcaccaaaggacaagattgtctgggatgtttcccaccaaacttacccgcacaaaatgttaactggacgtgcactcgcttggcttgatccagaccactatgaagatgtaactccatatagcaaccctgatgaaagcccatatgactattacgccgtcggtcacacatctacctcaattgccttagcaactgggatggctaaagcacgcgatttaatgggcaaacatgaaaacatcatggccttaattggtgatggttcaatgaccggtggccttgcttatgaagggctaaacaacgctgcaattgaaaagcataacttagttgtagtggtaaacgacaatcaaatgtcaattgatgataacgtcggtggcttagttactgctttaaagaaactacgtgattctaatggtgaaaccaaagaaaatccatttactgcaataggctttgattaccgttatgtcgcagatggtaatgatatccaatcaatgatcgatgcttttaaagcagttaaaaatgttgatcaccctattttgcttcatatcaacactctcaagggcaaaggttatcaacctgcaatcgacaacgaagaagcacaccactgggtaatgccattcgatttaaagactgacaagacgacagtagcaatgcctgaaggtccgaccgctagctctattgcactcgatgttcttgaagatcacatcaataatggtgagaagatcatggctatcaatgccgcaattcccggcgttttcggcttagacagaattaaaaacaaatatcctgaaaactaccatgatgtaggaattgctgaacaagaatccgttgccttcgctgccggaatggctaaggaaggtgcaactccagttttatttgaaaattcaaccttcttgcaacgtgcatttgatcaattatcacacgatgttgccgctaatgatttaccagttgtaatgatggttgctggtggtggcatttctggcacaagtaagactcacctaggtgtgtttgatcaagtaatgatttctaacttgcctaactggatctaccttgctccaactaacttagccgaagaaaaggcaatgatggaatgggctattaagcaaaagaagcatcctgtagcaattaagatgcctaccaaagatgttcctgaaggtaaagaaattactgctgttgactattcagaaatcaagtacgacattaaaccaggtaaagatgttgctgttttagcgttaggtgatatgtacgatatgctaggtaaaaaggtggctgaaaagacaggtgctagcttagtaaatccagtttctgctaatattttagacactgccgctttagacaaattgactcaagaaaacaaagttattgttactattgaagacaatattttggacggcggttttggtgaaaaagtagcttcctaccttggcgacaaggatattaaagtactcaactacggccaaaaacgtgtctatactgatcaagtacctttgaaagaaattttgaaagacaatcgtatgacagttgatcagattgttgaagatattgaaaatgcttaatagttaatcaatctatgaaaaaaagacgcaatgcgtcttttttgttttactcaaatttctgtggatgcttatcttgaaactgagccaaatcttcataagaggcttcaagttcatgctcaatttttcgataaacgagaatcaattcttgataaatcgctacattttggggatttggaaaataaacttggctttcggcagtacgctttttaatcttttccaggtctggcttatcttctaatgcagttttagctaaaaacatagctgctagggtaccacactgctcatttttaattacaatcactggtaagttaaaaatgtccgcgattaattgtctaacaaaatcactttgcacaaagccaccagtaacacgtaaagcttgaggctgtcccacttgatcaagcaatccttgagaggcgccaagcaagttaaaaacaattccctccaaaacacttctagccatctgcggtttagtgtgatttcgcgtcaagccaacaaaagatccacgtgcttgagcattccaaattggagctcgttcaccaccaagataaggatgaaacaacaatccattacttccagccggagcagtttgtgccacatttaagacgtcctctgccgtttcatctgggccaaaaattgtttttctggcccaatcgaacacaattccaccattatttacagggccgccaagcaaataatgtttggcgtcaacagggtaacagaaaaagcgattcttttgatcaacaattgccttcggtgcaattactctaaccgcaccagaagtgccaacattcaatgcaaaatctttctcatccaaaacgccgacaccaatcgttgacaaatacccatcgcttgcgcccaaaacgatttgagtttcatcatttaaacccaatttagcacgataatctggaataattttacccacagtagattgttgatcagcaattgtcggcaattgaacttgatctagcccaatctgagccaatatcttttcatcccaggtcagcgtttttaaattcatcattccactgccagcagccatagttgtatcagttaatatttttccagttaagccccaaataatatattctttgatactaatccatttttttacttgtgcaaaaagtgttggctgttcttctttaagccacagcaatttatacactggcgccatcggatgtggcggcatccccgtttgctgataaatcattcttgcccagcccgacttttttgcccgctgcactacatcactactacgattatctgcccaagtaatgctgtttgtcagtaactcattattttcacctaagccaattaagctgtgcatctgactagaccaagaaattgccaaaatttgaccagatgctttctgacttaattgataaatcattttctgtaccgcgtcaaaaataagctgtggatcttcttcagcctgtcccgcttcttcctgaatcaatggataggaaattgccaatttagctacttcacttccatcttcgccatacaacacacctttagtcgcagtagttcctatgtctatgccaattatatatttcatctttaaaattctttcttaattttagtataaaaaaacagccaccggagaaggtagctgtcttagtggtcaaaactatgcgtgaccacggtgcgtagaacattgttttttagtcggatttacttcttaagattttcgttaacgaaggcttcgattttatcgtctgagtctttcaaaaatggaagcatatcttcttccgtcttcatggtatctctaccattcttttccataaagtagtcccaaagggcatctctaactggcatatctgaatcactccagtcaaaagcttccttcatgtgacggtctaacaatgcagtcttaataatttcgtctgccatcttaaattacctcctaaaatattctacattacttattataccgcactttcttttgatcagctatcaaaaaagcactttccgcattttctgtaaagttcgtgctcgagctctgaccagcttcattgcttcaatatttagatgatcaatcgcatactctgtacttatctcgccaattatggttaataatgcaattaattcaacgtgtgacaagctattaacaaaattattgtaagtctcatcaactggaatcgataattcagagcggcatggttcattcacgcttccttgaatgtccgccttttctagcggaatcgattgactatagatttgcctgcgacgtgccatattgtaacgtaccaaggtccgtgcatgattaaacaatttagttttatataaactgctaaatttcccctttttaggcgagaaaactagtgctgcttcataacaaacaatcattgcctcttgatcccagtctttacgatcataatgatgcaaatagaattgcttcacgattgaatttactaacggctcatataaatgaaacaatttttctaaagcttggtcatctcctgcccgtactttcttaatcagcttctcttcattaatcattcaatttatcctccacctcaaagaatacagactatcccctgagtttgagaagaaaacacatgtttaatggacagaaatgagctttatgtatctaaaaaagtagacaaaactcacacttttgtctactttctgtttattttactaatggatttctactgttataagcttgataaagcaataccccggttgccacactagcatttaaggattgtacgtgaccaaccattggcaaagtaatagtttgatccatctgctttttaagtaatggggcgatgcctttaccttcgttaccaattacgagtacagtcttgccttgggcattccattcacgataatcagtacctgccatatcagttccaaagacccagtaaccgcgtttcttcagttctttagtagtttgaactaaattattaacgcgcgctactggcacataatcaattgctcctgtagatgttttagctactaccgaagttaagccagtcgcgtgacgcttaggaataatgatcccgtcaacgccagtagcatcggctgaacgcaaaattgatcccagattgtgagggtcttcaatagaatccaacattaataaaaatggttctttaccttccgcatcatacttgtccagcaattgatttaaatctgcatattcaaagctagaaattgctaaaactagaccttgatgattgccaccagcaaccaaacgatcaagcttatttttaggcacgtcttgaacaactaaacgcttttttttagctaaactataaacttgattagcaaattcttcttgtacaccgtgttgtaaaaaaaccttattaatcttgtcggcactttgtgtttttaaataatcaagtccagcatggcgtccaaagacaaaatctttatttgaagtcataatttttcagcccgtcctcttctacagtatcaatacaccacttgcttaagtctgccactcgatcatttttccccagtaaatcaagataaccaatcattgcttcaaagcctgttgataattggtatgttttcaaactagtattcttagccttagtatgacttttagcattacgtccacgacgaaaagcagctaattcatcatccgttaacatttcttcatcttgcatcttagttaccaacgcagcttgtgctttagctgaaacatagtgagtcgcttcacgctgcaatacttgtggtttaacgataccgcctttaactaggtgtctgcgaataattaattcatacactgcatcccctaaataggctaaagtttgtccatttaaagtatccggattaacatcctcttccgttagtttttttattttagtcacgagtccacctagttccttgtggggtatcttgaatagtgatccccatttcctttaattgatcacgaatttgatcactagttgcccaatctttatttgctcgagcctcatcacgctttttaactaaagcgtcaatttcatcgtcattggagccagcatttttaacgcaaagcttattagtatccacgccaaacactaataaccaactagctaatttctctttaaacttttgcaattcttgcttgtcagctctagcagcattagcgttggcattaactacaggcaacaaatcatagatagctgttaaagcattttggacattaaagtcatcgtccatcgcctgttcaaatttttcgttagttgccataatcgcctgtgctaattcggctgattcttcactagctgtatcatcttctagacggtaattaatattagtcaaagtatttttaaagcgatctaaaattgtagctgcttgtgctaaattttcagcagaatagttaatttggcggcgatattgtacgctagccatgaagaagcgcagtacttgcggatcaacttcccttaaaatatcgtgcactgttacgaaattgtgcagtgatttagacatcttttcctgatctttaccgacagttacaaaaccgttatgcagccaataattaacaaactttttcccggtcttagcttcactttgtgcaatttcattctcatggtgcggaaattcaaggtcttgaccaccaccatgaatatcgatcgtatcgcctaaatatttggtactcatgacagaacattcaatatgccagcctggccgtcccttgccccatggtgaatcccaagcaatttcatcgggttccttttgcgccttccacaaagcaaaatcgattggatcttctttgcggctttgttctgtatcgttaatgtgctctgaagcaccctcttcaagctgttcaatattttgatcacttaactgaccgtaatgcttaaactttttggcacgataataaacatcgccgtctacttcataagcatagccattgtcaattaggcttttaacaaaagtgataatgtcattaatttcatgagttgcacggggatgcaaagtcgccggctcaatgtttagcgctgtcgtatcagccaaaaaagcattgataaaattttcagccaatttgggtacagtcgttttttcagctctcgcttcgttgatcatcttgtcatcaacatcagtaaagttagaaacatacttaacgtcataacccttatattcaaaatagcgtctaatggtgtcaaaagcaattgcgcttctggcattaccaatgtgaatatagttatacaccgttggtccacagacatacatgctgatatgtcctggaactaatggcttaaattcttcttttttacgcgtcagtgtattataaactctcacggctaacacttgtcccttctgtcaaaataactaatttttattttagcagatgaaaaaagaagctgcatttatttgcagcctctttttcaatttatctaattaaagattattagcactcatttgcttcaaggttaaatcaatgtgttctaatacacgttctttacctaaaagctccattgcttcgccaataccaggtccaaccattgaacgcgtggtagcaattctaattggcataaagagctttcttcccttgatgccagtagccttacgagttgcttgaatagcgttcatgatttgaactgaagtaaatcttgggatgaggtctaattgcttcttgaattcttcaattacaccacggccatcatcattcttgatttcttcgatttcttcgtctgaaagatccttagcttcttcaaagaaaatcttagccatgtctacaatttgcttagtgtatgacatttgtactgagtagatgttaaccaattgacgaacccattccatcttttctggtgttggatgctcatcaacaagacttgcttcttgcaagttgttcaaagctaaatcaagcaaagtgtcgcgatcagccttcttgatgtattggttgttaatccattcaagtttcttttggtcaaaagcagcaggtgacttagacaaacgtgcagggtcaaattgcttgatgaattcacgcttgttaaagatttcgttttcaccctttggtgaccaaccaagaagagtaatgaagttaaacatagcttctggtaagtaaccaagatcacgatattgttcaataaattgaagaactgattcgtcacgcttagaaagttttttaccagtttctgaattaatgatcaatgtcatatgaccaaacttaggaggttcccaaccaagtgcctcataaacaactaattgcttaggtgtgttagaaacgtgatcatcaccacgaagtacgtgagtgatcttcatcaagtggtcatcgataactacggcaaagttgtaagttggcattccgtcacgcttttgaataacgaaatccccaccaatagtgtctgattcaaactcaaggtgtcccttaacaatatcatcccatgaataagtttccatttctggaatgtggatacgaacaactggctttaagcccttagcctttgcttcatcttgagcttgcttaatttcatcagcagtcataccctcatattcgtaagtatagtgaggtgcaacacctgcagcacgttgttcttcacgttgtgcttcaagttcttcctcagtcttgtatgagtaatatgctttaccttcatcgatcaattgatcaatatacttttggtaaatttcttttctttctgattgacgataaggaccatagtcgccacccttatcaggaccttcatcccagtcaattcctaaccagtgaaggttttccatttgagacttagaaccgcccttaacattacgcttttggtcggtgtcttcaattctcaagaccatcgtacccttgttatgacgagcgaataaatagttaaaaagtgcagtacgtgcgttaccaatgtgcaagtgaccagttggacttggtgcatatcttacacggattttttctttagccaaaattcatgcctctttcaaaaaatagtaaattcaaacaatcttagtttactcgttatatagtaagaattcaattaatgctagccaaaaactaattttaaagcttggggaatactcgaaacgggaattacctcaatgccatgatcttttaatccagaatacatattatgccgtggaataaagatccgcttaaaccctactttagccgcttcttttactcgtgcatcgattttatcaactcggcgaacttcaccagttaagcccacttcgcctacaaaacaatctgtcggcgaaatttctttatcggtataactggatgcaactgccatggcaattgctaaatcaattgctggttcattcaatttaatcccaccagttgcagtcaaatagacatcttgattctgcaacattaagtttccccgcttttcaagcaccgctagcagcaatgaagctttgttaaaactaatacctgacgtggtccttttagcatagccaaaagctgtcggagtaaccaaagcctgaatttctgctaaaagtggcctagttccttcaagcgataccaccacagcagagccagtagaattaggtaatctttggtccagaaaaattgatgatggattagttacctctcttaagccttcattaaccatttcaaacattccaatttcgtttgctgctccaaaacggtttttaacagaatgcaaaattcggtaagaatggtgttcatccccttcaaaatagagaacggtatccaccatatgttccaagatcttaggcccagcaatcgcaccctcttttgtaacgtggccgataacaaaaactgtaatggcatccatcttggcaattttcattaattcacttgttacttcacgaacctgtgaggcagagccagtcatcgaatcaagacttggttcattcatagtttgaatggagtcgattacaacaaagtcaggcttaacatcattgatttgttcgcgaatatcatgcatgtcagtctctggatataagagcatattactttgacctacacccagtcggtcagcccgcaatttgatttggttagctgattcttctcccgaaacgtaaagcaccttatatttttcagataagtcactcataatttgtaacatcaaggttgacttaccaattccgggatctccaccaattaaaactagtgagcctggcacaataccaccacctaaaacgcggtttaattcctcagatttagtgacaattcgttcttctttttcagctttaatcttatccagctttaccggttcatttaatccagtcttctgaatcaaacgactagcagttgccttagtagaacgcttttgcacttcttcagtttctttttcaaattgattccaagcaccacagttagggcagcggcctaaatagcttgccgaaatatagccgcaagaacgacacttatattgtgtttttactctagccattaatcacccttcttttcattagttgatccaaagccgctaactctttttcgactaattggatcatcatcgtcggtcttcaagtatttgataaaaatgccttgagcaatacggtctcccttcttgatgtgcaagggccgtacgccataattaatcatttgtacaaaaatttcgccctcattgttaggattattgtaataatctgcatcgataacgccgatcccatttggcaaagctagattacgcttaaaagtattagatgaacgattagctaaaatcaacacttcatcttctggcatataagctttaagtccagttggcactaacaacggctttaaaatctgatccgccatctcatagtcgcgctcatacagctggtgtccatttctaatcaacctaaaaattcgcacaaaatttagtcgccaaatgctagggatagtaatgtcttcagccgcttcgatgtcatagcctgcactagctagggtctgtctgcgaggaagattaatttcctgatcttgatactttttgactacttcaaatccacgtgttttcattccaaagctccatttatcttttattttgacagttatctattttacaatgtttttagtcaacacaaaataaatagctctctattatttattacgcaaaaaaatgagattatttttttaaaaaggaattttttatgaataagcaagatgcgcaccaaattttcactataaaaaatgaagaagacatactattatctagcgttaccttagataaaatcgctcgcaaagacagtaatgtctggataatgaaccatttttttattaatccacaatttaatagtaaggatttgcttgaaaaacaaatgcaaaaagtttggcaattagctcaagaaactaacttacccatttggccgcttgatcctatgatcattgactacttcacccagcatcctcaatttcacaaaatttggtatcatcgtccatttaatcgataagattattagacgactcattttgaataagataaaattaatttaagtacttataaaggaggattttttttatggtaaaagaaatcaacaatgatactattaataaatttgaacaagacttagctaaccaccctgtttttgatgtggctagtcacgctgctcaagaaaacggtatctacaaagctagtcaaaacttacaaactaagatcgacctagatccaaccttctcaatcgaaattgatacaggtaaccctgccgatcaaaagcagtctggtcgctgctggatgttcagtgctttaaacactatgcgtcacccattacaaaagaaatttaagttaaaggacttcgaattatctcaaaattacactaacttctgggataaatttgaaaagtctaactggttctttgaaaatgtgatcgcaactgctgataaggacttgggcgatcgtaaagtttcattcttatttgcgactcctcaacaagacggcggtcaatgggacatgctttgcggtattattgaaaaatatggtatcgttcctaagagtgtttatccagaaactgctaatgctactaattcaagtgcattaaacgacactttaaatactttgcttcgtaaagatggtcttgagttacgtaaattagttcaagatggcaagtcagaagatgaagtacaagctcgcaaggaagaaatgctaaacgatgtcttccgtattttggctacttcattgggtgttccaccaaagaagttcaacttcgaataccgcgatgatgacaagaattaccatattgacagggacattaccccaaaggaattctttgacaagtacgttggcatggatttagcaaaccatatctcaactatcaatgctccaactaacgacaaacctttccacaaggtattctcagttgaatacttaggtaacgttgaaggcggtcgccaagttcgccacttaaaccttaaagttgatgaaatgaaggacttaatcattaaacaattgaagagtggcgaagttgtttggttcggttcaaacgtagttaaggattctgaacgccgtgctggacttcttgatactaacctttaccgccgtgatcaattatttgatgctgacttcactatgtctaaagccgacatgcttgattctggtgaaagcatgatggaccatgccatggtgattaccggtgttgatatcgttgacggtaagccaactaaatggaagatcgaaaactcatggggtgaaaaacctggctttaagggttacttcgtaatgagtgattcttggtttaattcatttgtttaccaagcagttatcaacaagaaattcttaccagaagatcttaagaaggcttacgatgaaggcaaagataacccaattcaattattgccatgggatccaatgggtgccttagcatttaagtattaatagctataatcaaatagttaagtgtcggaaagaaatttctgacactttttttacaacttcaagtgtcctttcttgtatcccaaaaatattaggcctacaacgaaggcgaattcggtagagaggattcaaatggtaaagtttacgtaggatgaaaaaagcatgacagactattcaaaaagacaattaaaagcattagatagaatttcaaagaaaattagtgatgctgaaagccacttcgctagaattgaagattcagtacctgatcgtcgtcaccgtactgcacaacatgaaacgattaaggatattaaatctattttgaaacatgctagaaaagtcggcgaatacgatgctaagattgatgccaaagctgatgaaaatgagtatgtttacgttgaagatgaagaaggcgtcattaaggatcttgaaaaagaattcaaagaccttgatgatagacttagcaagttaaccgatgttgatggctatgacatcaagcgttatcgtgaagaacaccattcacttgaaaaggctaaagaagttttagctaaggccggcaaattgaagtaaaacaaaatataagtaaattacacaaaagacgtagttagataaaatgttctaactacgtcttttttaccaaatatgtaataagcgggttggatctaacttacttaagttgaactgatgcacatgttgctttttattttccggaaattctttcacaaaatccgctacattatacaaaccagttgaatatgtccaaactcccttaacctttctgatcggatccaacatctcatttcgaattggataagctgaaatcaaaaagtgcttgtgatgaaacttaaagacaaaatatggcaacttgaactgcttaactgcttcatcttcagttttagcaattgaaactacatttcgataagttccatacttttctgtaaacttgtcattaaatgaaaaataaaagttcgagatatgcacatgtggaaaatcttcttcatctaccatgtcaggaaccgcaatcacatgagcataacgatctaaatttgtctcacgctgtgacaacgcatgatccatctgatttggcacaactttatgtgcccagtatggtacttctggatgtgcttcataagaacgatacatttgcttaaccacttcaggcttaacccaatcgtaatgcattctagtctgattacgcttaagcaaactctctaaggtagtatgttgcatcagatctactacaaagcattcatagtgatacttgtctacccaaggcttaaaatgttcaatcgcacttggaacgatatgcgtcccatccacaataacagtttccccatattccatcttgtgttctacaaggtgatccaccatttgctcagtacgcacagttacgtgccgcggaatgacttggtgtaaaacatccgcatcctcttgatagtaaactgtcaaatccgccaatagtagcctaatttgatcacgactgatcgcataaggatttaagtgatggcgagtaataaaagaagatttaccggagccaggtgcacctcgtaataaaaataatttacgcatgcctaatactccaaactaaatatactagaaatcataatagattttaccatagatatgtgtaaaacctcatttagagcattaaaaaaatgcactaaggtgcatttttaacattatttacgtaaaatttgtttgttaataatctttaagtgatcatccatagtataaacaatcggttccgcattaggaacttccagttttacgatgtcatgatcattaatctgctctagcttttttatcaaagcacgcaaacttgaaccgtgggctacgatcagttggtcttcaccattcatcaatcgagatgcgatatgatcataataatatggcatgagtcttttctgagtttgatgtaaactttctgcccgtggcatcaaatgctgatcaaaatgcttataacggcgatcaatcattggcgacccctgcttaggtggaactgaatcaaaactacgtcgccacaatagaacttgttccacaccaaatactttacgtgaaatgtccttattaaggccccttaaagcgccgtagtggcgttcattcagccgccaggtcttagtcatcggtagccataataaattgcagacatcggctactatatttgctgtcacaattgcacgggataagactgaagtatgaatgtgggtgggagcaaaatccgaaatggttttaatcaattcaccagctttttctgcttgttcttcaccttttttagtcaacggaacatcgttccagccagtataaacattggcagcatttgccacactttcgccatgtcgaactaatactaatttagccattctaagattccttacttcattaatactctaacgatcataacaattcctgcgatcgtgaagataattcctaaagccataaaggctctaatgccgcctttattggtaggttgcttacgcctattaaaagcataggacatgtcataaatacccataatcaatacaataatcgctgtaaaaatattaacattaaacattctttcacctaatcttcgttaataccgtggcctggaacgatcatcttgtcttttctgccacgctcgcactctgcttgtaaggtaatatgattaatacctaactctttttgtaactcctgtccaatatcttggtatagctgctctaattcatcggctcttaatcctggggctacattaatatgcgcgtccatcataataaagtcatcgctgtagcgccaaacatggacatgatggatattttgaactatggggaacgataaaacaatcttgttcacttcattcaagtcgatatcaggattagattccatcaaaacattggctgctttcattgtattttcataagcttcatgcaaaacaaagattgaaactaaaatagtcaaaactgggtcaagccaagttacattccagaagtaaatgaagatcgcaccaattacaaccgctacactggacaaggcatcacttaacatatgaataaaagttgaccgtacattcaaattagccttggaatcgctatgcattgctagcattgaaataatattggcagccagcccaataatcgagacaatcagcataatgccaccgtgaatatgttccggcttccagaaacgttgaattgcttcaacaaacaaaaccacactgatcacgatcaagataacgccattagtaaaagcggctaaagtttcagctctttcataaccaaaggtcttaaactgattacgacttttgcgactaatcaggtgcgccacaaaagataaaataattgcaccaacatcactcagattatgaaatgcatctgaaagcagtgctaatgaacctgaaaaaataccacctataaattcagcaatagtaataacaacattcagtagagttacgaagacataacgcttagttgtatgatctttattcataaaatattttcctttcgttatcagtgtaccaaaaaaggccctacttcggcagtaggacttttatagctcttcagcatctacattataatcaacaatttcaaatgaaccgtcatcgtgcaaaattccacgagtaacgctcccattatttggaaaaacaatatcgtttttgccattactcttattccaatattttatggacaaagttttaataaagtcaccatggctaactaacaaaactctttgttcatctttagttaaatcgcgcaaaacgtcaattgcccgtaccatccgctcatctaactcatcctgattttccgctaaatgacgcggatcagccttttttgttgctgcacgaaatttgcgcaagcctacctgattgatgatcttagttacatcatcttcatggtcaattcctgcggctagtgctacttgttcccaagtctggttaatatcatcgccttcaaaagttccaaagaagacctcacgaaattcaggcagctttttaattttaccaatatccgagaccacattagcatccttcatcaagtgaacggtatcaattgctctcttcaaatccgatgaatacatgttatcaaagtgaacttgactcaaggccttagcggttctctttagatcgttaatccccttcacggttagaggagaatcgcaccaaccctgaactttgtccaattggttaaacattgtttcaccatgacgtaccaaataaacttctgttgccatcaaccttagcccccttttcattgcttaatattgtaccaaacttattgcagatatgccgtataaaagaagtaaccggcttgaatgaaggccaagcttgcaatgaaaattcgaactggcttttccggtactcgtcttaaaatagctggcccaatatagccaccaatgaacatcccgattgccaaaggaattgcctgaagccaataaatatgagaggtaaacataaatataatcaaggctactaaattagcaaaaccacaaatcacatttttgatagcgttaataacaataaatttatcattggtaatgtaagttaaaagtactagtacgatgactccaccagctgcaccaaagtaacctgtatacatccccatgactaaaagtgcgagaaaataaattattttaagccaagtaggctgtgtcttagtatttaaactatggtgtttaccagaaacaataatcatcaatcctgagaaagcaataaagaatggtactgctttttcaaaaatctttggaggaaaagatagaagcaaaatacaacccaaaattgatcccacaactgtaaaaatggtatagaacaaaacttgcttccaatgtccttttaactccttagtagaagatacagttgaaccgatgctagtccaaattagcgccgcatcattagttacattagcaaatactggtggaattcctactgctagcaaaactgggtatgatgcaagtgatgccattgaggccactgacgataataagccacctgcaacaccacctaataataagaaaattacggtccagattgtcattttttaattcctttcctaaaattgtctagttcattataattctaataggaactaacacaaaggaagtttattcatggctacatttgaaactttaatttttattcccgaaggcagtttattaaatgaaaaattagcagaaaaaactgcgctgcggcaaactttaaaacattatggggtagactggggaccagctgagcgactacgctacactagcttagaaaaagaatttaaaaatttatctagcaatgatcaaatcgatttagctttatctacatttttaaaagaagatctttctaaaacgcgaactgtttttgatgatgcaatgaaggatcaaaccaggttagtcaagggcgccatcgactttattgatgaagtcagtggcaagctgcatttgattttgcttgctaaagaaaagcgcactcaaatcgaaccgcgccttgcacctacagaattgctttcttcatttgacaatgcttatttcgccgatgattttacggacaagctgccaagcaaaaatattttctttaagattctgaaagacaatccagatattgatccagacacagttttagtaattggaactaatctggatgaagaaattcaaggtgcagaaaatgccaatctaaaatcattatggctggcacctaaaaaagacaagataccaatttcacctcatcctactcttcatttaagcaaattagcagatctttcattttacttagatctaatgtaagtagataattaaaatagttatagaaaggatgattttatgacaaaagttgctgtagtatttgcagacggttgcgaagaagtcgaaggtttaagcgttgttgacgtattgcgtagacttaacgttgaatgcgatatggtaggtttaataagtaaaaaagtagatggtgaccatcatattgaaatcacttgtgacaaagttgtagatgacagtttattagattatgatttggttgcttttccaggaggcatgactggttctgctaacttacgcgataatgaaaaattacgtgatctgatgattaagcgtcatgaagctggcaagtgggatgccgcaatgtgtgctgctccacgtgctcttgctcgctatggtgttttggcagatgcggacttcacttgttatccaggcattgaagaagaatgcttaaaagatgccccaagtgctcatttttcagagaaaatcaccgttactgataaagagcataaaattttaacaagccgtggtcctgctaccgcttgggcctttgcctatgcaattgctgaagctttgggagttgatactaagcaattaaagcatggtatgctttatgactacttagctgataatattcaagacagtttataatttttacgcgtggtgctagttaaatctttctagacaataagccaaattataagctaaaattgcaatttccaaccggctttgaaagcctatcagactacgtgctcgattgttctcggcattgtaataggtcagaagcgaaaagtcgctttcaattgttctgcgaatagccatcaattgatgatcattgtgctttttagctcctgtcatatttttacgatatggtgtccaaagttcataacccatttgttttagctgttgatgcagttctttgcctaaatagccttcgtcgccaagaagatagtaattagatggatgggcattttccagcagttcaactgtctccttggcatcatgaactgatgcttttgttacgacataatcaagaatgtaaccgtcatcgctaacaatggcatgaactttgaaaccatagaagtaaattttcttggtggccttataaccaatgttggcataaccgcgaaaaattttagcacgatagttgcgaattggttggcaaacaggtaccggaaagctgtcaatgatcaagaaatgtccattcaggtcaacctttttattcatttcttgccgtatctgataaatcaattgcaatagctgacgtgaacgtcgattaaaacgtgagtgtgataaacaattgaaacattcacagaatcttctttgtgattcaattcctgtcttagcttgccagataagtaaagccaaaatcagactgtccgtagttttaatttgatcaatatttcgccgatgagtaaactcagccggtgcatacaaacgataccagtgccgacaaattatcactaaatctttaaaactaacttgtaaatggtggctaaaacgcttaagcttaaggcagttcaatcagatcaggctcttttctattattatacaagttgagtctaacaagattggacttttttattaactaaaacgatttaactagcaccacgcgtaatttttatctaaccaacgaaaaaacgatcaagatttttaggcttgatcgtttttgattatttacttttctttcaatttttgattgatttgtttaacatctcgcaataattgtaaaaagtacaaaccataagcgagcaagtacatcaagacaaatactccagtaattactaagaagaaatgaaccgataaagccaaatcattaatcactaattcaaaagcaaaaaaggcaacatagctaacaaaaaagtttacaataatttgttttcgtagtgaccattgcgtttgttcaaaaatcaatcctgtcaaattgaaaaatgctcccatcacaaaagagacaatcaaataaaagagcaaacttgtaaacggaatttgagcatttttccaattcgttcccgtttgaaataaagttactattgaataccaagttaatccaattcccatgccacttattccacttaccaagaaagattccattcttttcataaccctaacctctctttcaagtctttaatttttcttctagaaatttgtacccgcatttggttcttcataatgacatcaatattgccaccatccataacttccaaatgatcaattttttgataattaataattgcacttcttgacgctattaaaaaattatgtggcaaaatatttttaacctgatataattgccctttatacctgtaactctgtgttttgtcataaattaaagtttgctcttgttcgacttgaattaaataaatattttcaaacttcacaggaataatttcatcatcataactgcaccaaatcgtgtcttgttcaccacttaattctttacccaattgactgaatttattagtcatcttttttaaccaaaattcagcactttctcccgctaattgattatcaatgttaaattttaccttcatccctttttctcctttcttgcttatcagtatagacgaaaaaatattttaaatttaaaaatttcggtgaatggttaatattggaaggtaaacggtgaaaaagatcgatattctaattttttaaagaaatgccatactaaaatttaaataagcgaccagagctaatccaatgtcattaagttaagacattgacaattaagggtgcttttttagagatcgaatcatttggattcgatctctttttttgtataaaataaaggcgaaaagaccagccttttcgcctatcttatatattatatattttaaaccttcaaaattattgccagaaagatggtgttaattatgaaagcccttcataagaatattctagaacgtcttgatcaaattatcaataatactggggatcatattcacgattttattaataatcctcatgcttttaccaggaaacgcactttagatgcagcgacagtccttaaaactacaattaacatgcaaggtcagaatttaaacagtgaactctttagagcttttggcgaagatgcaactaaaaagaacgataaagtagttagtacttctgcctatgttcaacgcaaaagccagctttctcctgcttgttttaaacatattctgactgtttttaatcaaaatctatttaatattcaactttttgatcatcactaccgtttgtttgccattgatggctctgactttaatcaaatctggaatccgaaatcgaataacattgtacaagcttcttctcataaaaagaaaccctattgtcaaattcacgttaatgccttatatgatctattgaataatacctaccaggattgtatttttcagcctaaatcagaaatggatgaacgcaaagcggctgttcaaatgcttaaagctttgaattgtggtccatatattgtaacaatggatcgtggctacactagtttcaatatgattgaaaactgcaatcgcctgcctaactgtcattacataatacgaactaaggctggacaaggcggagttaaagaaataacgacattgcctgatcaagaatgtgatcgtgagatttcctgcctggtaactacttctaactattactacatcacgcataaagccagtgagaatattcaccatgtccagcatcattatcgccaatatattaagtatcgctctaaaaatacccaggatctaagctgggattttggcgagttatgcacaataaaatttcgagcctgcaaatttagaattaatgatgccaaatcaggcaaagaagaatgggaagttgtgctaaccaatcttgatcgaaaaaattatccgctaaaaagaattaaagagctttatcatctgcgttggggtattgagacctccttcaagaaattgaagtattctttaggcagtgtacagttccattccaaacaagataaatttattgaaatggaaatttatgcccatatgattatgtttaatgcaatcagtcaaattgatgcacaggcctatattccgcaaaagcattgcaagtatcaatatgccatcaatttcaagcaatcatgcttgattattcagagcatgtatttggcttcttctttaacgcaagattttgaacggatccttattcagatcagctattataccattccaattagaccaggccgcaaggacaagagaaatattaagcccaaatcagctgtatattatttatatcgcgtagcttaaaaaagcagaatctgtgctatgccttatttgttgtacgaaaaaagcaccaatttaaccaattaaatgttaaatcagtgctttaaaagtctaatattaattgtcaatgtcttaacttaatgacattggagctaatccagtcgctttattttttgtagtctcaattgcaaaaataattaattatcattaagattaattgcaaaatccaagaaaatgcccataaaaagattaatacaacgcctacaactataataaccattgcacgagaatctaatcccatttggccgagattaacatcaattattatcgttactgcacctaaaacaaaaaggacccactgtaaaatattgaatgcttgattattagttttagtttgaataaatttatcgcgttcatcatcttcttcaatcttggctataccgatatatttagtactatagaaataaccgactgtcaaacagatgcccaatattaaccaaataacatcttgaatataattgacgctttttctatttgcaacatcataaattaattctaagagctgtatgactgatagaatcgcaaaaagaattgtaagcattccttcctttggcttgctcattcttcacatactcatttaagcaaaataaagtttcaatatctgtctcaaaaaattgtactaatttataagctaaaacaatcgatggtttgtaccgacccttttctaatgaaattattgtccgttctgtaacaccaactttttcagctaactcgcgttgtgtaagttgatgttttttgcggtattccttaattttattattgataatcatcatccctaaaatatgaagcggacttcatgaaatatacttcatatgtagtactttctaatgacaagacaatactttattgactagcttcattttttataagtctaacaaaaaacacacctgattgggatgttttatttatattccattaggtcaacttcaacactaaatgattcattacctggcatcttgccactttcatgtttaattgttatgaaaccttttttgagataaagcttttgtgcaggattgccctcaagcacttctaaataaaatggcctggtcgaattttcaagcgtaaaatcaatcagtttactaccaataccttgtccttgaactttaggatcaacatagagccagccaagctcttcttcgttaaatccgacaaaaccaacaactttattttcttttgttgcaacgtaaacttgatagtctcccggatttaaaattgaagtgcaacactaagtgttaaacaaaaaggccatgaagacctaaacttgaagtgacgaaaaatcaagaaaggaagatcttcatgaccaattcaaattctagcatttctaagcactatcatcaattaaccagcgtacaacgtggacaaattcaagcaatgctggattccggcataacttcccgtactgttatcgctcaagaagttggctgccataagtcgacaatcagtcgcgaaatcaaacgcggaagcgtcctgcaaagagacagcagctatttattgtatgagcactattacgctgatactgcacagatttattatgagaagcgtcgcaaaaactgctatcagcgcaatccattgaagcattatgctgtctttttgagaatgctctccagacgctttaaagctaaatttgatgccaccagcatcgatgagttcgttggtgaattccaaaggactatgccaggctacccttgtcccagcacaccaaccgtctatcgctatattgatcagggcttgctggacataagcaatattgatctgcctatgaagctcaaaagacgcaggaacaagcgtcatcacagccatggcggtcacgctttgcacaagaagcatcttggcaattccattgaacagcgtcctaaggaggttgaagacagaaaagctccgctgcactgggaaggagatctggttaaaggcgtcagacgcaagaatcagcctgctttaatgactttgactgaaagaaccacacgctttgaagtagttatcaagattcctgactatcgggcaagcacatgccaaaggctgcttcaaaaggagattgacagacatcctgcctggtttaaatcaatcacgtttgacaatggctctgagtttgcggatatgaccaagatcaagggctgccagatttactttgctcacccatattctccatgggaaaggggcaccaatgagaactgcaatggtcttttgcgtcaattcttccctaagggcaagagcatgaaagacaagtcaaaagcttatgttcaacaggcaactgatgccattaaccacaaatatcgccgaatcctccaatatcacacagcagaggaactcttcaagcaatatatctcttcataacctaactgttgcacttaatttgacaattcaggaacttgatagtcttcaaataattgctctttctttgatgctattttgaatggaataaatgcagcttcaagattggcaaattttaattcttgctttcgcgcttgatcgtggatgttgcataatttttcgaaatctgcgtcttcatatgatctaaaatttaacattttaaatttctccataaaaaatgtgatcatttgtggcctcttatttcattaaaacaaaaaggtggaaactaatatgtacaaaaatcatatcacaggtcaaacagctttaacactcaatttggattttaccattcccagcaatcacttggctaatgctatcagctggattgtggattcgattccagaagctattctgctttacaccctgctaaaacaggtcgaccagtataccacacagcagtcatgccaatgaactggttaagaagagctttatctactttaccaatctgttggctgatcaacgagggggctgtttttattgatggcactaaaattgaagctgatgctaaccgctacacttttgtttggcgcaaggctgtcgaaaagtatcatgataagctgaagggccaggcagttgaagcttacgtcagaactggaacaattagctaagacagctagcggtcgccagcgtcaagtacgctataaccctaactggcagtatttaaaagaaaaagcaaaagaagttcttcaaagcgaagaaggcaaacacatctaagaggcaaaaagaaagttgaaaccgatgttggaatagccttcatgatgatgaatataagcaaatattggaacagaaaatgaccaaaagaccgtttttatttaattttaaaagaaaaaaggacgattaaaactcacttaagaattttgatcgtcctattattatggtctaagagttagttttttcccagacactttattttttacttaagacctgtccacttccactcagtgacttcaggaatgtctttaccattatcacgaatgtattggtggtgtttagcaagcaagtcatccatttcattgatgaagtctggattcttacctgccaatgatggaatactttcaacagcatccttagccaagtcgaaacgatcaaggtggttcaggacacgcatgtcaaatggggtagtaatatcaccattttcttcgtaacagtgaatatgtatattatgatggtttcttgcaaaccagattgattccatcatagtcttgtatccatgccatgcaaagattactggaatgtcacttgggaataagcgatcaaactctttatcagagatagcattcttattatccttaggactcattaatttcatcacatctactacatttatgtaacgaatcttaaggtctgggaaacgcttgtgcaagatatcaattgcagctaaactttccaaagttggttcagtttcagttgaagcaaatacaatatctggcttatagccttgatcagttgaagcccagtcaatgtaactcaatcctttatcagctaatttagtagcttcttcaattgagaaccattgtggacgaggctgcttagaagttaccaaaacattgatgcattctctgtctttcaaagccttgtcgccaactgccaaaagcgtattagtgtctgatggcaagtactcatgaacaaggtctggacgattcttttcatataagtgagtcaagatgcctgggtcttggtgagtgtaaccattgtggtcttgttggaagacagttgaggttgcgacaaagttaagtgatggatagtcatgacgccagtattgttccttagcttttcttaaccacttcatgtgttgggtaagcattgaatcaactacacggccaaaggcttcgtaagtagcgaagaagccatgacggccagtcaaaacatagccttcaaggaatccttcatcttggtgttctgacaattgtgaatcaattacacgaccacttggagctaggttttcatcattaggttcatgaatttctggttcccattgacgcttttgatcatcaagaagtgcaaacaaacggtttgacttagattcatccggaccaaagccacggaatgtgtctgggttaagatcagcaacttcgctaaggtatttagcccattcaaccatatcttgtgcttccatttgacctggcttaaacttcaatgcgtacttgcggtaatctggcaagttcaaacgcttagggttcttaccaccattagtaactggattcatggccattctgtggtcacccttagccgtattttcagtaacgatcttcttaggtgaaccatcttcattgaataattcttctggcttgtagctcttaagccatttttcaagcatttccttatgttccatatcatcttgtgcaactggaattggaatttggtgagcccggaatgagttttcaattgggttgccatccaaatccttctttggaccagtccagcccttagggcattgaaagataatcattggccaatgtggcaaagtagcgtcattgttttcacgggcatgcttttgaatagccttaatttcttcaatgacttcatccatagtcttagccatttcttcgtgaacctgcattggatccttttcaccgtcaaaacgaccgcctttaaagactgaaacaaaatgaggatcccagcccatgccgcggaagtattcagttaattctttgtcactcatacgagaaacaatagttggattagaaatcttaaacccattgatttgcaaaattggtaataccgcaccatctttaattggattaataaacttgttactaaaccaactagctgcaagtggaccagtttctgattcaccatcaccaatttcaacagcagcaatgacgtcaggattatctaagatagcaccagtaccgtgtgaaagtgagtaacctaattccccaccttcatgaattgatccaggagtttcaggagcagcatgtgatgccacaccacctgggaaactgaagcgcttaaacaatttagccatacccttttcatcttgggtgatctctggatagcgttcagtgtatgaaccatccagatatgagttagaaaccattacttgaccaccatgacctgaaccttcaatatagaacatatccagatcatacttctttaacactctgtttaagtgagcataaataaagttttgcggagcaatagttccccagtgaccaattggctttggcttaacatcttcagcaactaaaggtgttttaagaagtggggccttcattaagaaaagttgaccaactgataagtaatttgctgcacgccaataagcatcgacgctctttaaatattcttttgaatcgtaatctacagccatgatgtcctcctatagaccatcgttatgtaaccgttttcccttacaagttaataatatcatttttgctaaagagttcaactactttcaaaattgataccatccaattttaaaatatatgaactctattcaatattttttaattctgccacatgaaatagcaaataatcaggatgttcattctttaagctatccacactaaaagcatcccaagctgctccacaagttttaacagacgctgatttgcccatttgcaaatcataacgagcatcccctaccattacactttgtttattattcaaattgtatctgtctaaaagtatcaaaataccatctggggctggcttataatgctgaacctcatcgcatcccacaaagtctttaaaatattgagtaattttcaaattatctaaatttctctttaaaatatcatgacttttactggatacaacaaataaatttttacctttttgctgtaaatcctctagtacatctcgcattccaggatataaatgtgtattttctttttcatactttccataaatattacggtaggtatcaactaattttttcgcatcactttctgacaattctctattagccattttagggaatgaaacatcagcaggaatacccataaaatctaaaatttgatcatcatctggctcatctaaattatttaacttaaatgcctgctttgtcgcaatcaatgacgccttacctgaactagccagagttttatcaaaatcaaaaaaataattttcaagcattttttaccccttagttttaggcacgctttgcatgatcttttgaatgagcattattttgaccatagtaagcatttttaccatgcttacgataatagtgtttatcaagtaggtattgtggtaaatggcaattagcacgtgttaattgcaaagtatgatagtcttcttccgccacaacttctaagactttagcattataaacagccttagctggtgtttcaccccaagtaaatgggccatgttgtgaaactaaagcacctggtgttgcttcataatcgagaccacgctctttaaaggttttgacaatagtgacaccagtattaccttcgtaatcttcctcaatttgttctttagttaatgcatcagctgctggcacatcagtatagaaagtatctgcatgtgtggtgttcaaagctggaatatccatcttagctgcagcaaatgaaacagcccaaggtgagtgtgtatgaacgataccaccaatcttttgaaaatgattatatagataggtatgtgtaggagtatctgaagatggatttctagtaccttcaaccacttcaccttttaggttaacaactaccatatcctcaggagttaattcttcatatggaacacctgatggcttaatgacgaacagacctttttcacgatcaatccctgaaacatttccccaagtaaaagtaactaaatttaacttaggtaattgcatattggcttcatagacttcttttttcaaatcttctaacattttattttccactttctaatctacaggttcttgttcaattccaacttttttaaagatcttgtcaaagaaagctttggcctctttaacttcagcaacaggatcatcatcaccgttatcacctggccacatttcaatcgtaaaacttccgttatagtctagtcttactaattcacgaagtagtccttcaaaatcaacgcagccttcaccaaatggaacatctctaaacttaccctcaaaaccatctgttactgccagagtatcttttaagtggatggcaacaatattaccaattccattctctaaatccttagcaggatcattttgtggccaagcagagaggttacccaaatccggataggcttgaagccatgggcttctaacttgctttttatattgtttaatatctgcaatgttagtaataaatggatcatccattgtttcaatcgaaagcataatgtttttctttgcagccatatgaacacatttagctaagttttcaacgtataattctctagagttctcactcttttcttcataataaacatcatagcctgccatttgaatattatgaattcctaaatctacacagagatctactgccttttggcacatttcaagagatttctttctggtttctggatctttagatccaagaggaaatcttctgtggccagataacatcaaattattaattcgaatgtcagtgtcccacattaaatctctaaattcttttctttgttccttggtccaatccaaacgtgctaagcgtgcatcactttcatctacagaaaattctaaaaaattgaagcctaattttttaactaaattaaatttttctttccaagataaatcttgtggtaatgctttttcgtaaatacctaatgagtttacagtcataacctatacctgccttttaatacaaaaagagcaatgcataataaacgtttttacgtgcattgccctttctaaaactaattaaggaattttttaatatgagtaaaattaatgattaaccccaaatgcgcttaatttcatctttatactgcttagcacgcgcatgtggatcttccgcatttctgatatcacggccggcaataaaacaatacactggtaagtctttaaataatttcaaaacttccggatgaactccgccggttactgaaaccttaaagcccatgtcaatcaaggccttaacgtttgcaacatctttttcgccccatttttggcctgcaaattttgcatccctactttggtggtaaacaacttgatcaataccattgttaagccattcttgcatacgttctttattgtcccagccttcatataattcaacttgaacttcaatttcttttctagcattaaccatggtaggaacagtagcagcgttaatacaagtcatccaatcagcacctgcatctttgcttgccttaccgaacttagtcccggcatcagcacatttaacatctgctaaaactattttatctggtcccactgctcttaaagcagatacggcctttacaccatcttgataacaaagaatggttcctgtctccaaaacatcaacttgatccattacttgtcttgcgacatttaaagcttcagcagtactctcgcaatccaaagcaacttgtaacattggtaaagccataaattaattctcctaagattatttcttaaacttatttggaatatctgaagcttcgatcttttcttttacttcaggaactgacattacattcttaacgccaattacttcgccacccttttgctttacttcatcaaacatgttcacaaaaggtaatgatgtaaataccacatcatagtttctagcagttcctctagcttctgaaacagaagtatgatctgaaactgtaatttcataacctaattgttccattgcttttcttgcggttctagaaagcattaaactagttcccgaaccattagcacaagctgacattattttcattttaattaacctctattctttaccatgtaacttcttccaaccttcataatcttcagtaatcatgaagtaacctttcttatcggcacgatattgcaattgaggaatcattaccaaaatgattattaaagagcaaataccaacaaagcctaagaatttcatcaatactgtgaagaatggccaaactgtagcccaatcgaacattccgatgtaaccaccgtatttcgccatacctacccaggtagcaattaaggcagacccgcctatttggatcaatccagaaataaaaggcatgatcattgcatatttgaaaccaccacggttatttgaatacaaaccgatagcagcgttatcaaagaataacgggataaatccggcgataacaattgttggtgagtggaaaatcaacaataaaatgatcattgtgaattgtcctaatgcaccaaacaagaaaccaattgtacctgcgttaggtgaaccaaaacctaaggtagctgcgacatcgataccaggaactgagccaggtaaccatttgtctgaaataccagtgaaagattcagtcaattcattaacgaatgtacgaacacctaattgtaagattgctaagaaaactgcaaattgtaatgaagtttgtaagatgtagaaaataaaactttggccaggttgcataaatttagctttaactaagtaatctggacctaatactactaaaattgcaccgataaaaattaacatcaaaattgatgtagataccatattgtcgttgaaaattgacatgaaacctggtaactttacatcttctaatcgtctggcttctttcttacctttctttttggctctattttccaaaaattctgataatttagcgaaaataaagataccaaacatttgttggtgagcgatagcaaagccagcaccatcagttaactcttgagtaatatctacagttaagtttgaaccaacggcccaatataaacctaagataatactcataacgattaaaataggtaaatgacctaattttggaaaacagaacaagatcaaccagaaagcggtagccgcttgttgtacttgcacgttaccagttgtaaaaacagcacgtaatttagtatattttgaaaatcttactaacacgatattgataatgtatgcaaataacaacaaaagcatagtatcggcaaaagatctaccaaactctttcataattccggcagcaactgcattctgtccaaaatatggatcagttaccatcgcattcaaatgaaaacgatcttttaatccgactaaaattggtctaaaagtattgatcagtccaacagaaccagccgataaaataaagtatccaactgttgctttcaagaagcctgaaaggacctcataccatttctttttctctaagatataaccaagtaagacaataaaaccaatcatgaaagctggttgttgcaaaatattggtagcaaaataatcccatatcttagatagaatatttaatatagccatttatactccccgcttccgatatcacatattatgtttcttcattactgccttataatcgtctaaattcttaaccttagaaagatcatcaatcatgttatcttccattaacatgtcagataaatgggcaatatttttgacatgtgtattattatctttagctgctagcataaagaataattttgcacttttatctgggtctgattcatcgaatgaaactggttctggcaaaattgtaagacctataccagtacctaaaactccttcgctatcagcctttgagtgtggcattgccacaccaggaacaataacaatgtatggaccatatttcttaacatcagcaataactgaatcaatataatcatcagtaactaacttgtcttgcttcattaccttaccagcaactctaattgcttcttcccaagtctcaggatgttcatcagtaatgtttaataaattattttctaaaaagtaacgtaacatcagcgtctcctccctcagctcaacagctttggttaaagacgttgagctagttaatcaacaaaaacgggactatagcatttctgggaatggtaagtctggatcattcttaaatgcatcatggaatccacgatcatacatgtattcgaaattatctttgtcttgtggataatcaaattcaccaccaacttgccaaatatatggcttaaatttatattgcaaacggtactttttacggtcccaaagagctaaaatatccttaggatcactgtagaagttagtccaaatgtcatagtgcattggaataataacttttgtctttaaagcttcacccattctcaaaacttgtgagtcgtcaagcttatcagtgataccacgtgggttttcaccgtatgcacatagagttacgtcaatttcgttttcgttaccgtgctttacgtaagtgtttgaatagtgagagtcacctgagtgatatacgttaccacctgaagtcttaactaagtagttaacagcaactttagccatttcaattggcatagtacctgctaacttcttgtttggatcatcttcggtaacaaattcagttctatcaaaggcttccattgccttaatagttacggccccaaccttgacttcatcgccaggctttacaacaatggtcttttcctttggaacaccccattcgatccattcatcgacaacgccttgaggtccaataaatttagcgtctgggcaatacttgtttacacatgctgcagtgtaaatatccaagtgatcatggtgagtgtgagttacacataaagcatcaagatcacgaagtgcaaatggatcaattacatatggcttgtttctaaggtttggttgtaaagcttcaccaccggtcatacgcatcatttggtgacctttacgcatcttaccgtcaccgtgagtatgtttaccagtaccgttccacatatcaatagcaacgttggtgccttcatgagtcttaatccaaacccccatacagcctaaccaccacattgcaatacttttttctggtacttgcttatcagcaatttgttcattcaagaacgtaccccattctgggaaattgttttctgcaaaagttttgaaattaacatcttctattttttttggtgctgacatgaataaatcctccttaattttcttatcctcgtcttcaatgttattatgcgcttagatgtgagtgctttcaaccattatatatgttaatttagcatattttatgttaatttttgtaaaattcaagtcatttataacactaagtgtataattttttacggtaagttgaataaataattaaaaaagcccaagtcctttgaatttggacttgagctcaaacaaaaagaccagtagtctgatgttaagaacaaaaaacacattagaagctggtcttttatgaattcaattgtaactgaaatcgcaaatattataaagtctgaagataattatattaagcgtgaaagaaaaataatctgtttcttcttaaacctgattaaggaaatcatggccttggctttagctaaagttgatgatgaaatgattaccaaggttaaagcacagggctatcagattgataagaagaatgagcgctcaatcaatatggcttttggcgaagttaggtatgtcagaagaagatatgtctgcccaggcaaacaagcaaggtatcccttggatgaattaatgggcttttacaaatacaagcgctacagtattttagcagtcaaaaacatcttagaagtaagcagcgttgccacttatcgcaatactgctctagcagtcaattgcctgtctggctttaatattagccatatgcaggtgggcaatttggtaaaaatggccgggaaaaatattaaagcgggccaagaagcagattcaagatatgatgccgcaggcactaagaaaaaggtcccagttttgtatcttgaaggcgatggcgtggtgatcaaaggcactaaaagccggttggaatttcatcgctatcaggtctgtgaaggcattgtcaatataagcaagaaacgcagaaagcgaatcaatgccaaggaatttgtttctttaagccgacttgatgcgctgaacgaagccaaggagtacctggccaatacttatgatctttctgatactgtaattcttagcaacgccgatggcggtgctggatatgccaaaacagacttcgatgacattgtagggctatgcaagcgtcatgagcatttcttggatgtctttcacctaaataagaaaatcaaagaaaggctatattttgcgcctgacctgcaaggcaagctgatttctgctttggaatacaaatacagctatgacaaagttaaaactatcctaaccactgcagaaagccgactaattgatgaattgaataccgagctcaatcatgattatctggggcgcctaaggaattatattgatcgtcattgggacgatattaagccgtttaagaaacgaaaactgactgtgactaaagccattggctgctgcgagagcaaccaccgcaagtatacctaccgtgttaaggggcaaggcaagaaatggtcaaaatctggagcagaaggcatgcttaggatcttaagctgcatcaagaatcgagagctggaattttggcttagcagcgagtttgaagattcagaaataactgtattgactgaacaggaattaaaagcagcggcccgtgacagcttaaagaagcgtcatgaagttcatttaggcatccagcatggcgcattaaccgcacaggtagctggcaatagttatttaagcaagctaagcagaaatttaagtcatataaatatttaagaaattaaggttagactaatggtttaaaggctaccgcaaaaacattgacacttactttataacataaaatatgtgaattattattttgaatggtaaaatagtaaccagttcgggtcgttttttatttaaattcaaaagttaatgcttttctggtgaagtattagtaagtatttattgaagtgaaagagatcattaaaaatgaaaaattcaattcaagtaattaaaaaacgtcgcaagcaaatcattgatttactaaatcacacaagggaaatttctatttctgaattaagcaaaaagatgaaggtttctgaaatgactattcgacgagactgtgattatttgtcaaaaatgggtaagatttcaaaaaagcgtggtgtcatatcccttgttgcaccagaagaaatcccattatctcagcccgttagttacattaagcaaagcttaggaaaagaggcagccagatatattcacgatggagatatagtatttattaactctagtagtatagcctttgatgcaattccacatttattaacaaaggatataataattgttactaacaatggttatgctggaaattttgaaaatactaaaagcaaagtgatcttaacaggtggggaaatacatcataaattaatcatgagcggtgatttggcaactaaagcatttctatctttacgtgccaactatgcaattattggttgcgcaggaattagcattaaccaaggtatttcaacaccagttatggaagaagcagaagttaataaaactattattcagcaatcacaaaaggttattgttgttgccgactatagcaagttcaataaattctctaattttactattggaacaataaaagatattgatttattaataactgatacttttgtagaaaacagtgtaattaatgaatttattaaagcaggagtaaatgtaatacaagtacctttaaaatgattagcaatctaaaaagacgctcaaaaattcaaatttagaatctttgagggtctttctttatctaaatgtatttattatttcatgttaacttaagcttcattcatttgcagtaatactttacccttattacctccttgagcaactttaaccatagctgctgcagtttgatttaaggtgaaaatatcaccatagatagatgcaccttagccttggctaatatatctgctgcttcttgcaattgctttccatctgataaacaaaaataaagtaataatgaacttgttatctagccccaaagttaatatgtagttcgtgttgaatagaaaggaaatctttaattgtgaaaaaaataatacgttctcacaactttatgtatacccaagatttagatcatttaccatttagtaaagataagttaaaagattcgacctcactatcatgtaatgcttcatttcaaagatgctaaaaccatttcaagagtatctaagattttcaatgatcatgaacaatatattgaagcatggcacagtattattaacaatggctatagctatctgatccatgaaactactaatgctaagagtaaacatcattatgatccaaaagaagtagtagcttcatttgattttaaagatagaatcaatgagattagacaaaaagtcaaaaagccatcacgacaagcaattgaaaactttattgatgattattcaaatgaaaaaatcactaaagaagaacttcaagaagaaatcggtgttcttgagatggcaaaacataaaacactgttagatcatattgaagacatcctagcttacaaaaagcatcaacggtttttaaaggacttcaaaggtcagagttgtaaggtctactggatatatggtgtttccggaattggtaagactaagttagtacgggaaattttagaaaaacaacatcctgaagatttctgtatttcaggtagtcaacgggatcactttcaagaatacaaagggcaaaaattcatagtaattaatgacttgcgaccaaatgactatgactatggtcaactacttacccttttggatccttgggaaatagacaaaatggctcccgcaaggtatcacgatcgttatctaaatgcgcgtgccatttacatcactaccccttatgatccacttagtttttatcttgaatgtaatattgctaatcaagtcattgattcttttgaacagttgaaaagacgaattatcccgttgcaacttactaaaagcaatactaataaagttaaaaatgatctaatcactgatgataaattatccgaagcaatttggaagataaaatcgcaaaaaaatactagtcatgctaatagagacaaaagcaatgactagattacctactacctagattttatctcaatattggtaactaaacaatctcaggagaataatagtggctaaattattaactcgcgaagaagcttcaaaatatattggtattgatcccaaaacttttgataaagtatttcgctctgatcctgactttaaaagatttaaactaggagaacacacagaacgctttaccattaaaagtatcgaagctttcatcgatcttaaagaaacaaaattgaaaaagatttgagaaatagtcggttatctgctaactttattgctggtaagataatcggcttttcttttgaaaggacgattaaatttatggcaagtattgaaaaacgtggctcatcatatagagccagagtaacaatctatcaacatggaaaacggaaactgtcaaatcttttgtgtaaatagatctttctcgtaaattgattttttaattatttatttaatcaaagtaggattctaaggtgtcctgaacctgaccaaagcctttatgaattcgattgaaataacggtcattgtagctcattgcctggatgccaataaatgcatcaagcgactgttcagttggaaattctgccttaggcttagctttacgcttgatgacgttgttaaaggattcaatcatattggttgaataaattgaagctctgatttgtttgggataattgtagaagactagcagatcgggctcaatttccttcaaacctttgatgacatggctataagctttattccatttggcatagaatttgtgcaagacagctgcagcttcttttttgtttgtctgttgatgcacctgtttgaattcgttcatgatcttttcacgatcgtcgacgcgtactttagcgcagatattgcgcatgacatgaaccaaacagcgttgaaaatgagctttaggataagtcctggccaaggctgttttcatgccaacaacaccatcagaaagaaagagttcaacttgcttcaagcctctggacttcatgttttgaagcatctctgtccagacttcaatgttctcactaggagcaatgcagtagtcaatgacttccttatgtccattaggtttaatgccaatggcaatatagactgcttcacgctcaaacgtttctcggcgcaaaggaaggtatgtcgcatccaaatagacgcagaaaaacttgtcgcttagcttgcgtttgtggtaagcctcaacctttggaatcatctgcttggaaatatttgatacctgagctggactgtaatggctgccatacatcttttcaattagatcggctatttccctggtggtcacgccattggagtaaagcttgataatcatgctttccaagatatccgagtgctgcttgtagtcaggcagcgtgtgctgatgaaattgaccgttgcgatcccgaggcacttgcacttcaattgggccaaattgcgtatcaactttgcggaaataagcaccatttctagagttgccagtattccagccatttctggcatagggatcatagcccagaaaggcagtcaattcagcttctagcaagttattaacagcctgttgtagttctttgcgcaataaatcatttattttgtctggattgaatagagcttgagcaaaatctttggtaaaatcattcatgaaggagttcttctttctgtatgtgttttttttgttcaaaccaatcatacgagaaaggaactcctttttctaatgtttaaagaaataaatttaaggaatcattcatccttacacaaactattttacagtctcggaaaacgtgattacttaactaagagttttaaaactgaaaaagaagctaaagtttggagtactactcttgaactacaaaaggctaaaggtcaagcaatagcccagcaaaacactttattcaaggacttttattatttattcgttcaaacagtaaaagtacatgacgttagaaaagcaacttttgataattatgttaaagctggtaaagtaattgataatctttttccaaccgctaaacttggtaagcttgatgacgtacaaatgcaaagtatcttagataaatatggcaaaacacattctaagaaaacggtaactgaattacttaagaaaattagaactgctctccgctatgcttatgttaagggatacatttacaatgattttgctagtttacttaaagcacacggaaaagaattacctaaacgcaataaagcttcatcaatgtctgatctaactaagttaaaacattacttacttgaacatacagataatgaatttaacttaatggtattacttgagattagtactggtttaagacgtggtgaaattttaggtattaagcctgaggatgtgcattacgatggtcagtattattgcgttgaagtaaaacgatcaattagccctactactgacgatactaaattaaaaactaaacattctagacgcagtgtgactattcctaagaatatttacgatctattgaaggatatctctcaaaaagattctggctatttgtttgactggttcagctttaaacagtctggtatgttaaaagaattgctcaaaaaaataggcatcccttcaaccacatttcatggtttaagagatacccacgcttcttttttattcagtaataatattcctttatcttatgttagcagaagattaggacacgattcaatcttaactactgaaaaatactatctggaattaatgccagaaaaaaagcactcgcaagatgcgaatgctttaaatctattggaatccctatagcattgtgaccataggtgaccaactgaagtctccaaaacgttgatataacaacatttttgaacgtaaatattaacgctttgagaattgagaagctttacgggctttcttcaaacctggcttctttctttccttcattcttgggtcacgggttaagaaaccggccttcttaagtggactacggaagtctgggtcaacttcaagaagtgcacgagcgataccaagacggatagccccagcttgacctgagaaaccaccaccgttaacattaacgtgaatgtcgtattgaccttcagtttcagttaatgtcaatggttgcttcaagtccttaaccaagttagggaatggaatgtattgatcaacatctttatcgttaacagtgatcttaccgttacctggtactaaacgaacacgcgcaactgaatccttgcggcgaccagtacctgtgtatgcagcttgttgtgccattatataacctcctagattaatttgttaatatctaacttttcaggcttttgtgcttcgtgcttgtggtcttcgccagcataaacatgcatcttcatgaattcatggtgaccaagagtgttctttggaagcatacccttaactgagatttcaaccatcttaactgggttattagcaagcaattcaccgtatgaaacggccttcaagccgccacgccatgatgagtggtggtagtagaacttgtctgaagcctttttaccagtcaatctaatctttgatgcgttgataacgataacgttatcaccagtatcaacattaggtgtgtattgaggcttgttcttacctctcaaaatagtggcaacagcagcagaaagacgaccaagggttacgtcagttgcatcaataatgtaccacttacgttcgatttcactagattttgctaatggtgtagtacgcaatttaaattcctccgtttatttgcagtttgaaaacaataagtttccggggcctatcgtggacaaacatactatattagagtacgtccttttaggcaaaatgtcaattataaatgctgatctaagcgatatttttgtggtacttcatcataaaaaacatgataaagatataaaccgctggcatgagctgtttgtctcacttcttgtcgatcttttgccgcgattacccgctgcaaatcatgcactggtctacgatcattcccaatctcaagcaacgctgctaccatgattcgaaccatattatataagaatcctgaaccaatgaagtcaaaaatcacttcattatcttttttatcctctgtgatttttacataataaattgttcgcactttatcttcaattcgaccaccactagccgcaaaactagtaaagtcatgttttcccaacaaatcttgtgccgcaatttgcatcttttcaatatctagtggatatggaaaatgtcctgtataaaaacgtttaaatggattaacaaaatgatctaaactaacacgatagcgataccatttccccttaatcgaataacgcgcatgaaaattctcatcaacaatttggcaatcatcaaagataatatcggttggcatcatagaattcattgccaaaatcattcgattggctggaatagttttaccaggataatcaaaatgaattacctgtccaaccgcatgtacaccggcatcagttctacctgacccctgcacaatcacacgctgccccttagtcattttcttcaacgcatcttcaattgtcccctgaacagttcgctggtctggttgaagttgaaagccatgaaaaagatgaccatcataagccatcgtcattttatatcttgtcgtcatatttctaatatgtcctaaaagttaatagtaatccgactaacagtacaaaataaaataatgcaattaaatcatattttgaccaacttaaaacgcgatatttagttcgtccttcactactacgataaccacgtgattccattgctgtagataaatcaattgccgtttctaaagactgaataaacaacggaaccaaaatgggcgtaattgccttagcacgttgaattaaaccaccgtcattgaagtccgctccacgtgatctttgcgcattcataattttaaaagtctcatcaaacaaagtcggtacaaaacgaagcgcaattgaaattactaacgcaattttatccaccggcactttaaacaacttaagcggcttaagcagccattccatcgcatcagcaatttcaagtggcattgtagtaactgtcattactgttgaaattaaaataattaatgtaaaacgaataaaaatatagattgcattaatcaaaccatagctagataatgaaaaaatccaccaatgccaataaatatgaccaccagtcataaaaaacaattgcaaaagcgacgtaaagaaaattaaaccaatcaaaggcttaacgccatcccaaaatacttttgcatttaatcctgtagcgatcacagccaaaaaacaaaaaatggtcacaatcgcataagttattgaattattagctaaaaagatagccaatataaataatatggtaactaataatttactccgaggatccattttataaataagagaatctcccggaatataacgtcctacaattatcttactcataaactaccctcgcaaatttttcttaatttcattaataagctgatccagtgttaacggtttatctttaaagttaaagttcgtcaaatctgaggcaaaaagactagccgttggttcactcaaatagtgcttttctagccagtttttattagtaaaaatcgccttaggcgcatcatgtctaactaatttaccatgttccatcactaaaacatcatctgcatattcggccacatcatccatattatgcgtaaccaagattacagtatgacctgctttttgatagtcaacaaataatttcatcatttccttacgagacttaggatctaaccccgctgctggctcatctaagcataaaatttctggttcatcagccattaccccagcaattgcaacacgccgcatttgtcctccagataactcaaatggcgacttatttgctagcgatttatccaatcctactcgcttcaaccatttcaaagctttacttttagcttcatcatcggttgctccaaagtttttaggaccaaattcaatgtcttcaagcacagtattttcaaaaagctgtgcttcaggaaactgaaaaaccaaactaacccgcttgcgtaactttttcaaattcttatttcctgtttgagcagtaatatgataaccagcaatatcaattgttcctgaactcggcttcagtaatgcattaaaatgctgcatcaaagtcgacttaccactaccggtatgacctaccaatgcaacaaaactattttcagttaattcaaatgaaacattatctaatccttttttctccattgaagttccgggagaatagatataatttactttttcaaatttaattgacatagatattgtttcaactcatctttcgtttttatatttttaggtacagaaattcccacttcatttaatttatttattaatttttgtacaaatggaatgtctagccctatttcttgcaacatttcagttttactaaaaatttccgttggagttccttgagctaaaatcttgccatcatttaagacgatcacattatcagccatattagcctcatcaatgtcatgtgtaatcgaaataactgtcaaattcttctctttctttaaatgcttaataatttttagcacctgctctctccccttaggatcaagcatcgaagttgattcatctaaaataataattttcggttctacggcaagaatacctgcaattgctactctttgcttttgtccaccagaaagattagctggctctgcatctatataatccagcattccaacgtctgctaaaacttttctgactatttttaccatttgctcccgaggaacagctctattctcaagcccaaaagcaacatcatcgccaacagtagctccaacaaactgattatctggattctgaaatacaataccgactttttccctaacatcccagactgtcttttgatttaacgtcattcctaaaacagtgattctagaattattagcagaatcaggcaaaagtaacccattaattaatttagaaattgtggacttaccgctaccgttgtgacctatcaaagatgtccaggaacctctttttattttaaaactaatctgatcaagaatcgcttttttagtatcgggataggtaaatgagacatccttaaattcaacagcactatctactggcatttttccacttcctttcttaaatcgcttattagcatattgtaacagaaaaaaagagcaaaaaaaatcacccatgaagagggatgatttttatcatctaagctagactaagcttgcgccatcatctttacgcttattctcactttcatggataattcttaatacgtattaagttgtgttactctaaattaaactaattcaagaataaccattggagcagcgtcacccttacgaggaacggctaacttcaaaattctggtgtaaccaccattacggtccttgtaacgaggtgctacatcactgaaaagcttttgcaatgctgacttaacaacaactgcatctttttcttcgtgaacatctgcaacttcgtcacgtacaaatgcagcagcctttcttctagctgctaaatcgccgcgcttacctaaagtgatcatcttttcggcagtcttacgaacttctttagcacgagtttcagtagtaacaatgcgttcgttcatgattaattgagtagtcatttctctaagcattgcttttctgtgagcactatcgcgacctaatttacggtatgccatggatttgcctcctttattcacctaagcttagtcttcttgacgaagtgaaagacctaagtcggttaatttatttttaacttcttccaatgatttacgtcctaagttacgtacacgcatcatatctgattctgtcttgtcagttaactcttgaagagtattaatgccagcacgcttcaggcagttatatgaacgaacagaaaggtcaagctcttcgatagtcatctcaagcttcttttccttcttatcgtcttccttttccaccattacttcgctgaatttagcatttgcatctgctgattcaaataccttaaagtgttcaactaaaattttagcagcaaaactaagggcgtcattaggcttgattgaaccgtcagtccaaatctcaaaagtgagcttatcaaagtcatctctcttaccaacacgagttgattcaacttggtagttaaccttcttaattggtgagaataaagagtcaactgggataactccgattggcatgtcatcactcttattgtcacttgcagcaacataacctctaccattctttacggcaagttccatatgcaagtgtccaccttcagcaatggtacaaatatattgatccggattcaagacttgaacgtctgcatcaactttaagatcatcagcagttactgtggctggaccttcaatgtccaattcaataaccttttgttcatctgaaagagactttaattcaagtttcttcaagttcaagatgatcttggttacatcttctctgacgccaggaactgttgagaactcgtgtaaaacgccatcaatttgcacataaacaagtccagtacctggaatagaagtaagtaatactcttcttaaagaattacctaaagtagtaccaaagcctcgctcaagtggttcaacaacaaacttaccgtaagaatcttcttgttcaacaacggtaatatttggtttttcaaattcaatcattactgggcccctttcaaaacgttacgtcctatatcaaggacaaaattaaacacgacgacgttttggtggtctggaaccattgtgaggaactggcgtaacgtcacgaattgcagtaatttcaagaccagttgcttgaagtgatctaatagcagattcacgaccagcaccaggacctttaactgaaacttctacatgtttcatgccttggtccattgcactcttagctgctgcttcagctgccatttgagctgcaaatggagtagacttacgactacccttaaagcccaatgcaccagctgaagaccaagcaactgcattaccttgaacgtcagtaatcatgactaaagtattattaaacgttgagtgaatgtgtgctacaccgctttcaacatgcttcttcacacgacgcttacgtgctgttttctttgcaggcatcaataaacctccttataaataaaattaacgatttctcttagtacccttacgagtacgagcattgttcttggtattttggccacgaactggaagtccacggcggtgacgaataccacggtaagaaccaatatcaactaaacgcttaatgttcatgcttacttcacgacgtaagtcaccttcaacacggtacttgtcaacttcagcacgaagcttttcttgatcttctggagttaaatcctttgaacgaatatcttcagatactccagcatcagcacaaattttcttggcagttgcttcaccgataccgtaaatgtaagttaaagcgataacgattcttttatctcttggtaagtcaacaccagcaatacgagccataaactacaccccctctatttctaaccttgacgttgcttgtgctttggatttgctgagcaaattaccatcacacggccatgtctcttgataactttacaatgttcacacattggtttaacagatggtctaaccttcatgtttccctccgttatattactttataaaccgatacgtaattctacctttagttaaatcatatggagataattccacagtcacacggtctcccggcaaaatacgaatgtagtgcatcctaattttaccagaaacgtgtgctaaaattgtggctccattttccaattcaactttaaacatagcattaggtaaggtatcaactaccttaccttctacttcaatgacatcatcttttgccaaagttgttcctccgcaattaaacagtcatatactttgaaattataacacggataaaaaattatacaaatttttcttctattgattattactcaataccgcatcaatatcttcaaagactttttctggagtttgttcaccattaattacagtgagcaagcctttcttctgataaaagtccttcaaaggtgcattcatcttttcattaacttcaagacgattcttaacaacttctggtttatcatcttcacgttgataaaattcatggccaccacagcgatcacaagtgccctcaacttttggctgcttggaaagcttgttgtaagtagctccacaatttttacacatgtatcttgctgataaacgcttaatcaaagtgtcttcgtcaacttcaagcgcaatgacatttgttaaaggtttctccaaacgttttgtaataccatctaaaagttctgcttgtacagtggttcttggaaaaccatctaagataaaaccttctttaatatcaggttgacttaaacgttcctcaaccaactttgcagtaacttcatcgggtactagattacccttatcgatataactcttagcttcaagaccaaccttcgtcttgttagccattgcttccctaaacatatccccagttgaaatatgagttaagtgatatttatcaacgattcgctctgatgctgtacctttaccagcacctggtaaccctaaaagaattaagttaatcatttatccgttcctatctgatgaatccaacatattctctcttcattaacaagccgttaatttgacgagataactcgagaacaaccccaatcacaattaaaagacttgttcctcctaaaccaatggaacttgggagattccaaaagttagtagccaattgaggcagtaaagcaactaagcccaagaataatgaacctactgttgataatttcatcaacatctttgaaatataatcctgagtatcttttcctggccatacactaggaatataagcaccctgcttttgtaagttttctgctagcttctcagggttgacctgtacgaaagcgtagaagaatgtaaataagataattaaaagagtgtagataattaccccaggagtagtttgtaagctaaagatttggttcattactttaaaccattgttgatcgccctgggttctttgaaaggccattaaaatcgttgccggtgtaacaataaatgaactggcaaaaataaccggaataactccagatacattaacctttaatggtagaaaactttcagaaccactcatcgtcgctcttctcgtatattgaattggaatacgacgatcagcttgttcaacccatgtaacaaattgagttacgataaggattgcaactataaccgcgatgaagaacaaaatgccttgccaacgatcactagcactattattaataatttcttccttataaatttgccatagaccacttggtagtcttgcaataataccagcaaaaataattactgagataccattacctagacccttatcagtgatttcatcacccaaccatgttaataacatagttccagcagtcataataatagcaatttctatataagtctgtggtgtttgattctttaccaaacccatttgagttaaagcgttaaagcctaacgtaataccaatactctggataaaagcaacaactaatgctaaatatctagttacttgatttgttttacgtcgacctacttcaccttgttttccccattctactaacgtaggaacaatatccatctgtagcagctggataacaatctgagccgtaatataaggagaaacacccaaagaaaatattgaatagttatctagtccaccaccagatacagtatccagcattggaactaaaccagtttgcgcaacctgcgtgatcgccttcgcattaacaccgggaacggtaatgtttgcaccgatccgatacagcaaaagaataaagagcgtgaaatagagcttatttctaatttctttatctttgaaggcgttcttcaaggtcgaaaacattagatcacctcaacagttccgccagcggcttcaactgcttgcttagcagatgcggaaactttattaacctttacagttaacttaacttttaattcgcccttgccaagtaacttaacacctgacaattctttctttactaagccattatctttaagtgattctacagttacttcactgccgtcttctaacttgtttaaatcatctaagtttacaattgcatattccttgcggttaatgttcttaaaaccacgcttaggcatagttctgaataatggcatttgaccaccttcaaaacctaaacgagtatgaccgccttgacgagctaattgacccttttgaccacggcctgaagttttaccgtaaccacttgaagtaccacgaccaacacgttttctattgcgacgtgagccttcagcagaatgtaattcatgaagcttcattaatttggcacctccttgatattctatttgttaatctcttcaacagagattaagtgagcaatctttaataatgcaccacgagtagcagcgttgtctggaagaacaacagtactatccactctacctaaaccaagagctttaacgatctttctttgttgaggtagacggtgagcaacacttctaattaaagtaatctttaaatcagtcatctatgatctccctaatcttaagctctttcaggttgacgaagttttgcaacttcttcactagttctaagcttcttcaaaccatcgatagttgcacgaacaacgttaattggagtgtttgaaccaagtgactttgaagttacgtctgagataccagccatatccataacgatacgtacggcaccaccagcagcaacaccagaaccagcttcagcaggtttcaataaaatgttacctgaaccgtagtgaccaataacttcatgaggaatagtagtaccaactttaggtacattgatcattttcttcttaccgtcttctacagccttacggattgcttctgggacttcttgagctttaccagtaccaaaacctacacggcctttcttgtcgccaacaacaacaagagcagcaaatctcatgcgacggccacctttaacaaccttagtaatacggttgacagcgactaattgatcttcgatatcgtctttgtttctgcgattgttacgagaatcattgcggtttgccatgtgttaattctcctttcctagaaatctaatccgttttcacgagcagcatcagctaatgcttgaacacggccgtggtataagtaaccacttctgtcgaatacaacagtagaaatgttttttgcctttgcagcttcagcaattgccttacctacagcagcagcttgttctactttagttgcatctgatacattttcatccaaagttgaggcgcttgcaagcgtaacacccgctacgtcatcaattaattgagcgtagatgtttttatttgaacgaaaaatgcttaagcgtgggcgctcagcagtaccagaaatttttccacgaatacgtctatgacgctttaagcgtaacttgtttttatctggtttagaaatcacaatttcacctcaaaaataactacttattacttaccagtcttaccttccttgcgacgtacgtattcatcaacataacgaatacctttacccttataaggttctggtggacgtacggcacggatttcagctgcaaattgaccaacatcttgctttgaaacaccttcaacttctacatcagttgctgaagttgcctttacagaaacaccttctggtgcagtcaatacaactgggtgtgaataaccaacatttaaagtaatcttgttgccttgtgcttgtgcacggtaaccaacaccgattaacttcaaagtcttcttataaccgtcaactacaccttcgatcattgaagctaagttagctctttcagtaccgtgaagtgctttgtcgctttcgcttgaacgtgaaaagttaatttcaccatctttttgttcaaacttaatctttggatcgaagtatctagttaattcaccctttgggcccttaacagtaatattgtcgccttccttggtaacagtgacactgtcagggacttcaatagtctttaaaccgattcggctcattgattgttctcctttctgtcagtattaccaaatgtaggcaattacttcgccgccaacgttcttttgtcttgcttccttgtcggtaataacaccagcagaagtagaaacgatggcaatgcctaagccattaagaactttaggtaagtcttcagcgccaacgtagtttctaagacctggcttagaaatacgcttcaaacctgagataacacgttctccatttggaccatatttcaagaataccttgataacgccttgcttgttatcatctgcaacttcgtaatcacggatgaagccttcacgtttcaaaatttctgaaatagactttttaatgtttgatgcaggaatttcaactgaatcgtgttttgccatgttggcatttctgattctagtcaagtaatctgcgattggatctgtcatgaccatttaagctatcctcctaaccgtatactaccaactagcctttttaagaccagggatttgacccttgtgtgctaattcctttaagcaaatacggcataatccgaatttacggtatacggagtgtggacgaccacatctctcgcaacgtgtatattcgcgtgaagagaacttagcaggacgacgatttctgattttttgtgatgttttagccattaatgtcctccactatcttgcaaacggcataccaaattgagtcaaaagttcacgagcttcttcatcagtgttggcagtagttacgataacaatatctaaacctctagtgcggtttaccttatcaaaatcgatttctgggaaaatcaattgttctttaatacctaaagtgtagttaccacgaccatcaaatgaacgagttgatacaccacggaagtcacgaacacgtggaagagaaacattgattaacttgtacaagaaatcgtacattctgtcgcctctaagagttaccttagcaccgatagacataccttcacgtaaacggaagttagcgattgatttcttggccttagtgattaatggcttttgacctgagatcaaagttaattcttcaactgcttcatctaagttcttggcgttagaaactgcatcaccaacacccatgtttaaaacaatcttgtcgatcttaggtacttgcatagatgacttgtagttaaacttttcttctaatgcaggagctaccttttcgttgtattccttagctaaataacttgccatgtgtgtcctcccttctacttatcttcttttttactactaattactttaacgtttgatgcgtgaattgaaccttctgattcaactacaccaccattagcattgctttgtgaaggcttttggtgcttcttaatcttgttaacgcccttaaccactacacggtttttcttaacgttaacagaaagaacagtaccttctttacctttatcttttccggcaataacttttactttgtcaccagttttaacgaacatcagtgcacctcactatcaattataagacttcaggagcaagagagacgatcttcataaagtcgttctcacgtaactcacgtgcaactggcccaaagatacgagtaccacgtgggctcttgtctgcgttgataattacgccagcattttcgtcgaacttgatgtatgaaccatcttcacgacgtgcacctgatttagttctaacaataacagcttttacaacgtcgccttttttgacaacgccacctggtgttgcttgtttaacagtacatactacgatgtcaccaatgttaccggtcttacgctttgaaccacctaagactctaataactaaaagttctctggcaccagagttatcagcaacctttaaacgggattcgttttgaatcactgtgtaatcctcccctcactaaatccgcaaattaaacagatttcttaacaatctttactaaacggaagcgcttcttacgagataatggacgggtttccatgatacgtacagtatcgccaactttagcttcgttattttcgtcttgtgcgtagtacttctttgaatatctaatacgcttgttgtaaacagggtggttcttgtaagtgtcaacaactacaacgatagtcttgtccatcttatcagaaactacacgaccttggtatacgtgacgacgatttctttcgtttgtttcgctcaagttaatagctcccttccattaattgttttctaacgctttttcgctcagaatagtcttgattctggcgatattcttgcggactttgctcaagcgagcggtattttctaattgacccgttgcttgttggaaacgcaaattgaagagttcttctttgtattgcttttctttttctaacatttcatcagtggttaatgctctgatatctttagccttcattagattcgccacctacttccgaacttctagttacaaacttagtcttaattggtaacttagttgaagcaagacgtaaagcttcacgagcagttgcttcatcaacaccaccaatttcgaacataatcttttctctcttaactacagctacccaacctgctggtgcacctttacctgaacccatacgtacaccaacacctttagcagtgtatgacttttgagggaaaattctgatccaaaccttaccgccacgtttcatgtaacgagtcatagcaacacgagctgcttcgatttgacggttagtaatccaatgtgattcgagggcttcaagaccatattcaccaaaggcaatatatttaccacccttagcagcaccacgcatcttaccacggaattcacgacggtgttttactcgctttggtactaaaggcattatctatttcctcccttcgctggctttgaagctggcttattcttacgagtaggtaagatttcgccacggttgatccaaacttgaacaccaatttcaccataagtagtgaaggcatttacccaagcgtaatcaatatcagctctcaaagtttgtaatggaacacgaccttctgtgtgccattctcttcttgccatatcggcaccgttcaaacgacctgaagtttgaaccttaatacccttggcaccagcacgcatagctctttgagtagcttgacgcatagcacgtctgaaagcaatacgagcttcaagttgacgagcaatactatctgctactaacttagcatcaagatctggtttcttaatttcaacaatattaatgtgaacttgcttaccagttaaagcatttaattgttttctcaaagcttcaacttcagaaccacctttaccaattaccatacctggcttagcagtatgaattgaaatgttaattctgttagctgcacgttcaatttcaacagtagatactgaggcatccttcaacttttctgaaataaattttctgatttgaaggtcttcatttaaagtttctttgtatcccttgtcagcataccattttgattcccaatcacggataacaccgagacgaaaaccgtttgggttaatcttttgacccattaatatacctcccttaatcgttcttttctgaaactactacaactacgtgactggttctcttgttaattggagaagccatacccttagcacgtgggcggaatctcttcaaagttgcaccttcatttacgtaagcttctgatacgtaaaggtttgcactttcaagatcgtagttatgttctgcgttagcaatagctgaacgtaaaactttttcaacgattggggaagcagctctaggcgtaaattccaagattgctaatgcttcagcaacgctcttgccacgaattaagtcaacgactaaacgagcttttcttggagcgatgcgaacagttcttgcttcagccttagctgaactaatttgttctgccatttagatgtttctccttcctctaagcttgtgttgtggctttatcatcagtggatttgtgtccgtggaaagttcttgttggaacaaattcacctaacttatgaccaaccatgtcttcagttacatatactgggacatgctttctaccatcgtaaacagctatagtcaaacctacaaaggaagggaaaatagttgaacgacgtgaccaagtcttaataacttgcttcttatctgcatctgcttgtgcatcaaccttctttaacaatgatgcatcagcaaaaggaccttttttaatactacggctcattaattaaccctccttctactacttgctacctttacggtgacgaatgattaacttctcgctggccttcttggtatctctagtcttaataccacgtgccttcttaccccatggagtcataggttgaggacgaccaactggagccttaccttcaccaccaccatgtgggtgatcgttagggttcattacagaaccacgtgattgtggacgcttgcctaaccaacgcttacgaccagctttacctaattgaatcaatgagtgttgttcattaccaacagtaccgatagttgcacggcatgatgacaaaatcttacgaacttcaccactttgtaatcttactaaagtgtaatcaccatcagcacctaaaacttgagctgaagcaccagcacttcttacgagttggccacccttgcctggcattaattcgatattgtgaattgaagtaccagttgggatattctttaattccaaagcgttacctggcttaatgtcaactgaatcacctgattcaactacatcgccaacttttaagcccttaggagctaagatgtaagctttgataccatcagtgtagtgaagcaaagcaatgttagcagttctgtttggatcgtattcgatagcctttacaactgcctttgcgttgtccttgttacgcttaaagtcgatgatacggtatttttgtttgtgaccaccaccacggtgtcttacagtgatatgaccatatgagttacgacctgcagtatgtgattgagattcaagtaaagtcttttcaggctttgtcttagtgatctcagcaaagtcggaagaagtcatatgacgacgaccattcgtggttggcttgtaaatcttaatagccaattgactgacctcctattacttgttgtcttctgtgttatcgtcttggaaaatcttgatgtcgtttgaatcgttagttaaagtaacgatagcctttctacgacgagcggtcttaccagtgtaacgacctactcgcttgtccttgccgcgaacgttcataatgtttacgttcttaactttaacatcgaagatttcttcaacagcattgcgaacttgtgtcttggttgcagttaaaagcacgtcgaatgtgtacttcttatcatccattaagttcgtggacttttcagtaatgacaggtcttaaaatgatatcgcgtgcgtccattaagccaaaacctcctcgatcttcttaacagcatcttgatctaagatcaacttgccatagttaacagcatcttcaacgtttaagccattaactggaacaaccttaaccttagtcaagtttcttgcggaaagttgtacattgttatcatctgaaacaattaaaactttaccgtcagcatttaagccgtttaacattgatactaattccttagtcttaggagctgacatagtcaacttatctaaaacaattaaatcattgtcaatcaacttttgggaaagaactgacttaatagccaaacgacgttgctttcttggcatagtgtatgcgtatgaacgtggagttgggccaaagactgtaccaccaccgcgccattgtggagctctgatagaaccttgacgagcacgaccagtacccttttgtctccaaggcttcttaccaccgccgcgaacagcagatctattcttaacctttgaggtaccttgacgcttgccggctctttgtctaataattgcttcaaaaacgacactttcatttggttcaataccaaaaaccttatcgtttaaagtaacttcaccagagtctttaccgttttgatccataacttttaaattagccattctagtcctccttcctatttatcagcctttacagctttagaagcagtcttaacaacgattaatgagttcttagcacctgggacgttacccttaatcatcaatacgttcttgtctgcaacaactttttcaattactaagttttcaatggtaactttcttcacacccatgtgacctggcaagcgcttgccctttggtacacggttaatgatggaacccattgaaccaggaattctgtggtatcttgaaccgtgagtttctggtcctcttgattggccccaacgcttgatgttaccttggtatccatgacctcttgaagtaccagtaacgtttacaacgtcaccttccttaaatgtatccacagtaacttctgagccaacttcatagtccttaagctcaacaccgcggatttcccgaatgaagcgcttaggcgaagtctttgctttatcagcatgacctttttctggtttgttgctcaaaacttcacgcttgtcttggtaacctaattgaactgcttcgtaaccgtctgattcaacagtcttaacttgcataacaacgttaggagttgcttcaacaacagttacaggaacaaggacaccatctttagtaaagatttgagtcataccaacttttcttcctaagattcctttggtcatgtttacacctctttctatttaaattacagtttaatttcgatgtctacaccgcttggaagatcaagcttcattaatgaatcaacagtctttggtgttggattcaaaatatcgattaaacgcttgtgagtgcgcatttcgaattgttcacgtgagtccttgttcttgtgtggtgaacgaagaactgtgaataaagttctttctgttggaagaggaactggacctgaaatttcagcaccagttctctttgcagtagctacgatcttagcagctgattcatcgagaataccatgttcgtaagacttaagtctaatacgaattgtttgacttgccattaaattacctccttaacgtcttctttaaaagatgactcgctcggcaaaaattccccgcacgccactgtggcaatgcagcctggcgtgccgcaaccttttgcgtcaacgctttacaacgattttcacacttaagggcacactgtcccataagcacaaaaactattgtactttgtccctccttaaatatcaagggtttacgacttttttcttaaatttatttacaaaaaaagagttatcaaaataaaaatgcaatgtcattaagttaagacattgacaattaagggtgcttttttagagatcgaatcatttggattcgatctctttttttgtataaaataaaggcgaaaagaccagccttttcgcctatcttatatattatatattttaaaccttcaaaattattgccagaaagatggtgttaattatgaaagcccttcataagaatattctagaacgtcttgatcaaattatcaataatactggggatcatattcacgattttattaataatcctcatgcttttaccaggaaacgcactttagatgcagcgacagtccttaaaactacaattaacatgcaaggtcagaatttaaacagtgaactctttagagcttttggcgaagatgcaactaaaaagaacgataaagtagttagtacttctgcctatgttcaacgcaaaagccagctttctcctgcttgttttaaacatattctgactgtttttaatcaaaatctatttaatattcaactttttgatcatcactaccgtttgtttgccattgatggctctgactttaatcaaatctggaatccgaaatcgaataacattgtacaagcttcttctcataaaaagaaaccctattgtcaaattcacgttaatgccttatatgatctattgaataatacctaccaggattgtatttttcagcctaaatcagaaatggatgaacgcaaagcggctgttcaaatgcttaaagctttgaattgtggtccatatattgtaacaatggatcgtggctacactagtttcaatatgattgaaaactgcaatcgcctgcctaactgtcattacataatacgaactaaggctggacaaggcggagttaaagaaataacgacattgcctgatcaagaatgtgatcgtgagatttcctgcctggtaactacttctaactattactacatcacgcataaagccagtgagaatattcaccatgtccagcatcattatcgccaatatattaagtatcgctctaaaaatacccaggatctaagctgggattttggcgagttatgcacaataaaatttcgagcctgcaaatttagaattaatgatgccaaatcaggcaaagaagaatgggaagttgtgctaaccaatcttgatcgaaaaaattatccgctaaaaagaattaaagagctttatcatctgcgttggggtattgagacctccttcaagaaattgaagtattctttaggcagtgtacagttccattccaaacaagataaatttattgaaatggaaatttatgcccatatgattatgtttaatgcaatcagtcaaattgatgcacaggcctatattccgcaaaagcattgcaagtatcaatatgccatcaatttcaagcaatcatgcttgattattcagagcatgtatttggcttcttctttaacgcaagattttgaacggatccttattcagatcagctattataccattccaattagaccaggccgcaaggacaagagaaatattaagcccaaatcagctgtatattatttatatcgcgtagcttaaaaaagcagaatctgtgctatgccttatttgttgtacgaaaaaagcaccaatttaaccaattaaatgttaaatcagtgctttaaaagtctaatattaattgtcaatgtcttaacttaatgacattgaataaaaatgataactcttttttatatgaaattgttttcaattaagctaactgcattaatcagttcttaacggaagctattcagcatctccgccgcgcttcttaatgatgtcagcttgaattgatttaggtgttggtgagtagtgatcaaataccatagtaaatgtaccacgaccctgagttgatgaacgcaaagtagttgcgtaaccaaacatttctgaaagtggaacaaatgagttgatgatcttagcaccggctctgtcttccataccttccatggtaccacgacgagcagtgattgaacccataacatcacctaagtattcttctggagtagttacttgaaccttcataattggttccaagataactgcgccagcctttgaagcagcattcttcaaagcaagtgaagcagcaaccttgaaggcagcttctgatgagtcgacttcgtgataactaccatcgtaaagcttagccttaacgtcgatcaatgggtaacctgcaagaacaccattcttcatagcttcttgtaaaccttggtcaactgaaggaatgaattcacgaggaacaacaccaccaacgatggcatcttcgaattcgtaacccttaccttcttcgttaggagtaaagtcaatccaaacgtcaccgtattgacctttaccacctgattgacgaacaaacttaccttgtgccttagcttccttggtgaaggtttcacggtaagcaacttgtggttcaccaatcttagcatcaacgttaaattcacgtctcatacgttcaaccatgatgtcaaggtgaagttcacccatacctgaaatcaaggtttgaccagtttctgggttagtttcagcacggaaagttgggtcttcttcagtaagcttttgcaaagcaacgtccatcttatcacggtcagcctttgacttaggttcaactgatacttggataactggatctggaactttcaagctttccaaaataagtgggtgatctgggtcagttaatgagtcaccagtagtggtgttcttcaaaccgatagcaccagcgatgtcacctgagaatacttctggaatttcagtacgtgagttagcgtgcatttgaagcaaacgacctacacgttcacgtgaattctttgaagcgttcaatacgtatgaacctgattcaagagaaccggtgtaaacacggatgaaagtcaaacgacctacgaatgggtcagtagcaatcttaaatgcaagagctgcaaatggcttcttatcgtcagccataagttcaacttcatcaccagtcttaggattgtgagcaacgtaaggcttaacgtcaagtggtgatggcaagtagtcaataacaccgtcaagcatcatttgaacacccttgttcttgaaggctgagccagcgtaaactgggaagaacttcaagtccaaagtagctttacggatagctgcctttaattcatcgttagaaatttcttcaccgccaaggaatttttccatgatgccgtcatcaacatcggctacggcttcaattaagtcgttacgacgtgcttcagcttcttccttgtattcgtcaggaactggaacagtatcccacttagaaccaagcttatcttcgtcgtagatgtcggcaaccatgttgattaagtcgataacaccttcaaaagtgtcagctgaaccaattggcatttgaacagcatgggcattagcgtttaaacgttcgtgcaatgacttaactgacttatcgaagtcagcaccgatcttatccatcttgttaacgaaaacaatacgaggaacaccgtaagtttcagcttgacgccatacgttttcagtttgtggttcaacaccagcttgggcatcaagaacagttacggcaccatcaagaacacgaagtgaacgttctacttcgatagtgaagtcaacgtgtcctggggtgtcgatgatgttaattctgtggtctttccattgtgcagtagtagctgcagaagtaatggtgataccacgttccttttcttcatccatccagtccatttgtgaatcaccttcgtgagtttcaccaattttgtggatcttaccagtgtagtaaaggatacgttcagtagtagtagtcttacccgcatcgatgtgggccataataccgatgttacgtgtctttgctaatggaaattcacgcttgttagccataaattattctctccttaaattaaaacgaacaaattagaagcggtagtgtgcaaatgcacggttagcttcagccatacggtgaacatcttcacgcttcttaactgctgaaccagtgttgtttgaagcatcgataatttcgttagctaaacgttcatccatagtgtgttcgttacgtaaacgagcgtatgaaacaagccatcttaaacctaaagtagttcttctttcaggacgtacttcaactgggatttggtagtttgaaccaccgatacgacgagctctaacttccaaaactggcataacgttgttcatagcttcttcaaatacatcaagtggttccttaccagtcttgtcttgaacaatgttgaaagcatcgtaaaggattgaagatgccttagctctcttaccatcgaccattaagtggttgatcaacttagtaacaagctttgagttgtaaactggatctgctaaaacgtctctcttagttacgtgaccttttctaggcattatttaactcctcctttaatctttcttagtaccgtacttagaacggctttgctttctgccatcaacaccagcagtatcaagggcaccacgaacgatgtgataacgtacaccaggaaggtcctttacacgaccaccacggattaatacaactgagtgttcttgcaagttgtggccttcacctggaatgtaagcagtaacttcgatcaagtttgaaagacgaacacgagcgtacttacgtaaagctgagttaggcttctttggagtcatagtaccaacacgagttgcaacaccacgcatttgtggagctgggttgaatactgattccttcttcatactgttgtagctgtaattcaaagcaggtgactttgacttagtgacctttgaatgacggccttttcttaccaattgattaatggttggcattaatttttcctcctaaaatactattttgttcacacatccgggagtttcttttttactcacgaatagactgttcaaaacatacaaagactattgtactcggttttaagcagaaagcaaactttttcaaaataaaaaaagaaaaatcggctatttttgcgtaataaatagtggaggtgtttttttgaaatacttatttatttttactaactttataattggaagttgcttggcttctcacgcagcagtagtttacgagcactggaatgataaaaattttatttactcacgttctcagtgcaacaactgtcaccttgaattatcaattttggatgaaattccattattatcttatctttttcttcaaggaaaatgtcgttattgttatcaacaaattccagttgaattatttttatttgaattaattggcggctttgccttttgtttactcgattttagtaagacacaggacattattaccgctattttgcttttttcgcttttagtcgttgcaatctctgattatcaaaagcaagaatttgatcttctcctactaattccagccattagcgttgcgattttattcaaccaatttgcagcttttacattaatcgactggatctcttttacattattgctaggaatttttagctatagcataatgcaaagaaaaatggggctaggcgatttattaatttacttaattatcgcttgctacttcaccccatcatttgccaatttagtttttctatttgcttcaatcttggtaattgcaatttttcttattgaaaaaactcctattaaccatcgctatccatttattccatatattttcctaggattagtactaacccaattaattttttagacaaaaaaataagcattcccgctcttaaaagattggaaatgcttatttattttcaataaagcttagtcttgcttagctttatccttttctttcatttgcttttcaatatcagcaattgagtatactgaatctggcttcttaacgtcagcttcaggttccatgctgcggtatacaggcataccagtaccagctggaataattttaccaataataacgttttccttaagtccaagaagtggatcattcttacctctaatagatgcatcagtaagaacacgtgtggtttcctggaatgaagcagctgacaagaaactgttagtttccaaagcagccttagtaatacccaagataacgctttgagcagttgctggaataccaccagaaataataacttccttgttgcggtctctaaattgaccaatatccataacttcacctggcaagatgtcagtttcacctggatcaaggacacgaaccttttgcagcatttgacgagttaacacttcaacgtgcttgtcggcaatgtctacaccctgcattctataagccttttgaacttcagctaagatgtacttttcagtagttaatgtatcagtaacttgaatcaattccttaggatcaacagaaccaagagttaacttgtcaccacgatgaacgtagtcaccttcgctaacagcaactgaagctgtataaggaacactgtagcttctagtatcaatcttacccttaacagtaatttcacgagtatgttctgctgggttttcttgaattgaatcaattacaccatcaacttcagaaatggttgcacgacccttagggttacgtgcttcaaacaattcttgcacacgaggcaaaccttgagtgatatcttcagcaccggcaacaccaccgttgtggaaagttctcaaagtaagctgagtacctggttcaccaattgattgagcagcaacagtaccaactgcttcaccaacttcaacttcttcaccagtagcaaggttcataccgtaacacttgcgacatacgccgtgaggagtatcacaggtaagaattgaacgaatcttaacgtgagttacacctgcatcacaaatcttgtgtgccatgttttcatccatcatgacatctctgccgacaatagtttcgccagtttcaggatctttaacagtctcagcagtgaaacgaccaaccaaacggtcaaataatggttcgatcatttcgtcaccttccatgatggcactaactgtaataccacgatcagtaccacaatcgtcatcacgaataataacgtcctgagcaacatcaaccaaacgacgagtcaagtaacctgactgagcagtcttcaatgcagtatcagtcatacccttacgagcaccgtgagtagacatgaacaattccaatactgacaaaccttccttaaagtttgaagtaacaggaatttcgaacaaaccaccgttaggagtggccatcaaaccacgcataccggctaactgagtaaagttagaaatgttaccacgggcacctgagtctgccatgattgaaattggattacgaggtgcgtgaatttgtgcaatttcgttttggatcttgtccttacatgcattccaaatactaattactcggtcgtgacgttcttgttcagtaatcaaaccacgtctaaattgcttagaaacaacatcaacttgtttacgtgccttggctaccttttcatccttatcttggatttctggaacgtcagtcataccaatagtaatacctgaagtagttgagctaatgtagcctaacttcttcaaatcatccaagtattctgaagttctttgaaccttgtaatacttgtaaatagtagcaatagaatctgacaagaagcttcccttaaatggactagcgattaaatcatcgcctacttcatcgatcttcttatcaatctcttcgccttcacctaagaagtacttagcatccaacggattgttcaagttctcttcagttggttcattgatatagaagtaatcatctgggaacaattgattgaagacaatcttaccataagtggtaataaagatgccgtgttcatgtcccttaggccatggctttttaggcatagcatctgcagacataccaataatggtatggtagtgaatatcgccattttcgtaagctacagcagcttctgctggtgagctgaagatcataccttcaccttcacgaccgcgttcggcctgagttaaccagtagttacccaaaacgatatcctgtgatggagtaacaattggcttaccatccttaggagccaaaatgtggtgagcagccaacattaacaatcttgattcagcaacagcttcatcagaaagtggtacgtgaatagccatctggtcaccatcgaagtcggcattgtaggcttcacaagctaatgggtgaagtctaattgacttacctggtaccaagattggctcaaaggcttgaatactcaaacggtgaagagtaggtgcacggtttaaaagaactggacgttccttaatcacatcttcaagtacatcccagatatcgtcatcttcacggtcaatcttacgcttagcattcttgatgtttgatgcaattccacgtttaactaattcatgcattacaaatggcttgaacaattccaaagccattggacgtggcacaccacattgatagaatttcaattttggtgaaacatcgataactgaacgaccagagtagtcaacacgcttaccaagcaagttttgacggaaacgtccttgcttacccttaagcatatgtgaaagtgacttcaatggacggttacctggtccaacaactggacgaccacgacgaccgttatcaattaaagcatcaacagcttcttgaagcatacgcttttcgttttgaacaataatattaggtgcgttcaaatcaagcaatctcttcaaacggttgttacggttgattacacgtctgtacaaatcgttcaaatctgaagttgcaaaacggccaccttcaagttgaaccattggacgaagatctggtggaattactggaacggcatccattaccatccattcaggcttgttacctgaattcttgaaggcatccaagatatctaaccgtctaattgcacgcgtacgtttttgaccagtggcagtttgaagttctttcttcaaatccttaacttctttatcaaggtcaactttcttaagcaaatcgcgaacagcttcagcacccatcttagcttcaaaacggttaccgtacttagctttttgttcacggtattcagcttcagttaataattgcttaggttcaaggtcagtatcacctggatcaattacaatgtatgcagcaaagtaaataacttcttcaagtaatcttggagaaatgtccaaaactaatcccattcttgatgggatacccttaaagtaccaaatgtgagttacaggtgcagccaattcaatatgacccatacgttctcttcttacctttgaagaagtaacttcaacaccacaacggtcacaaacgataccacggtatctaacgcccttgtacttaccacaagcacatgaccaatcttttgttggtccaaaaattctctcatcaaataagccatctttttcaggctttaaagtacggtagttgatggtctctggctttttaacttcaccatatgaccagcttctgatcttgttaggtgatgcaagaccaatttgcatactttcaaacttatttacgtcgatcaaaagtttaacctcctactatttagaaactttatcgtcagactcatctgcaggagctaccggcttatctgcattttctttactgtctttatcttctgattttccagtttcttcggctaacttcttcttttcttgctcttctgccatccgtgacaaagtatcgatgttcaagtgttcacttgagtcttcatccatatcacgaagttcaatttcattatggttcatatcaagaacacggatatccaaacctaatgattgaagttccttaacaagaacacggaatgattctggaacacctggcttaggaatcttttcacccttaacaatagcttcatatgcctttacacgaccaacaacgtcatctgacttgtaagtcaaaatctcttgcaatgtgtaagcagcaccataagcttcaagggcccaaacttccatttcaccaaaacgctgaccaccaaattgtgctttaccaccaagtggttgttgagtaaccaatgagtaaggcccaattgaacgtgcgtggatcttgtcgtcaaccatgtgggtcaacttcaagtagtgcataacacctacagatacacggttgtggaatggttcaccggtacgaccatcataaacaacggtcttaccatctttatcaacacctgcttgacgaactgtgtcccaaacgtcattttcgtcagcaccatcaaatactggtgttgcaacgtgaatgcccaattgacgagcagctgcacctaagtgcaattcaagaagctgtccgatgttcatacgtgatggaacacccattgggtttaaacaaatatctactggagtaccatctggtaagtatggcatgtcttcttctggaacaactgcagcaacagtacccttgttaccgtgacgaccagacatcttgtccccaacttgaatctttctcttttgagcgatgtaaacacgaaccattgtgttaacacctggtgaaagttcatcgccggcttcacgagtataaaccttaacgtcttgaacaataccgccaccaccgtgtggtacacgaagtgaagtatcacgaacttcacgagctttttcaccgaaaatagcgtgaagtaatctttcttcagcagataattcagttacacccttaggagttaccttacctaccaaaatgtcgccatcgtggacttctgcaccaacacgaacgataccatcagcatcaagatccttcaaagcatcctcaccaatattaggaagttctctagtaatttcttctggacctaacttagtgtcacgagcttctgattcataatcttcaatactgattgaagtataaacatcatccttaactaatcgttcagaaagcatgatggcatcttcatagttgtacatgttccaagtcatgaaggcaatcaatgggttttgacctaaagcaagttcgccatgatccatagttggaccgttagcaattacatcactcttgtcaacctgatcacctaatttaacattaggagtttggttgtatgacttagagttatttgaacgacggtacttttcaagtgtgtatttgtccaaagtaccatcttcacgtctaatacggatttcattagcatcaacgtattcaactacaccagcagccttagcgattaaagcagcacctgaatcgtgtgcagcacggtattccataccagtaccaacaagtgaaccatgcggattaattaatggtgcagcctgacgttgctggttggcacccatcaaagcacggttagagtcatcgttttcaaggaatggaatacatgctgaagcgacagaaacaacttgcttaggaataacgtccatgtagtcaatcttatctggagaaacttcgacgttatcttccttttgacgagccaagatcaacttctccttaaatgaaccatcatcattcaatggagtgttggcaccagcgataatgtaattatcttcttcgtcagcagtcaaatagtcgatcttatcagtaaccttgtggtccttccaagaaacacgacggtatggggtttcgataaaaccatacttattaataatcgcatatgaagcaagtgagttgatcaacccaatgttaggaccttctggagtttcgataggacacaaacgaccatagtgagtatagtgaacgtcacgaacttcataaccagcacggtcacgggtcaaaccaccaggccctaaggctgacatacgacgtttatgagtcaattcacctaatgggttatgttgatccataaactgtgaaagttgtgatgaaccaaagaattccttaatacttgcaacaattgggcgaatgttgatcaattgttgtggagtaactgttgaaggatcttggattgacattctttcacgaacaacacgttccatacgtgccaaaccaattctaaattggttttgaagaagttcaccaacacgacgaatacgacggttacccaagtggtcgatatcatcagtagtaccaatttcatcttgcaatgcaaagaagtaattgattgaagctaaaacatcagctggagtcaaatgcttaacgttatcagcaatatgaccatttgacattaatttaacttcacgttcagggtctacctttgagtaaaccttaatttcttgaactgtaataggatctggtaatacgccttcctttgaaggttggtaagttaccatcttaaagtcatcacgatcaaggtatggagctaacttatccattacttcgtgggtaactacagtacccttcttagcaacaatttccccagtatctggatcagctaaagtttcagctaaagtttgaccgtataaacggttcttaagtgaaagcttcttattgatcttgtaacgacctacaggtgctaaatcgtaacgacgtggatcaaagaaacgggcatacaaaagtgaacgtgaagaatcagtagtctttggttcacctggacgaagtctttcatagatatcctttaaggcttcagctacacgtgagtcagctgggttcttatgaacatccttgtccaaagtgaattgcaaagtatcactttgaccaaacatatcaataatgtcactgtcagagccaatacccattgctctaatcaatacagtaagaggcaatttacgagtacggtctacacgaacaaatgaaacgttctttgcgtcggtttcatattcaagccaagcaccacggttaggaataacagtagtaccaaagatttgacgaccattcttgtcataatcgccagtgtaatatacaccaggtgatcttaccaattgtgaaacgataactctttcagcaccgttaacaataaatgaacctgattcggtcattaatggcaaatcaccaaagaaaacatcttgagtcttaatttcaccagtttcttggttagtcaatttcaaggtaacgtgcattggtgcagcataagttgcatcatggttacgggcttcatcaactgtatactttggcttttgcaatttatagccaacatattctaatgaaagcttacctgagaaatcgctaatcggcataatgtcatcaaagacttctttaatgcctttatcaagaaaccacttatatgattcggtttgaacatcagttaagttaggtaacttcaatacttccttaatgcgggagaagctacgtctagttcgatgtttaccgtagttcactacgtgtccatttaacaaggaaaaacatcctttctgtctaagaaagcaaatattacatttctgttacaaattcaaaaaactgcaattttaggcataaaaaagacaaaaacaacaattgtcgtttttgtcccttatcattttgctggacaatagatcagcaaaatcctgaatctcagtctttttaaatcagcaaaaattatatgatattttcagcattttgtcaaggtatagcaccaatatcacttgacttttacagtttcttttttcggattaactacttcaaattttaaatgtccatgctgactaccaattttcaaagtgtcgcctgacttaacttcgcctacaatcagcatctcggcaatcttgtcttcaatatcattttgaattgctcttctcaatggtcgagcaccattttctggatcataaccatcttgtgcaatctgatccagtgctgcccgtgatagcttcaattcgatacccttcttttgcaaacgaactaccagcttgtgcgttaacaaagttacaatattgcgcagctgcttcttatctagttcatcgaagataatagtttcatcgattctgtttaaaaattctgggcggaagaattgtttgattgcttgttcaactttagctgatctcgccttggctggatctgcattatctgcattgaagccgactgccttattatcaaagagcgaacgagaacctaaattagaagtcatgattataattgtatttctaaagtcgacttttctacctttggagtcagtcaaaaatccttcatctaaaacctgcaaaagcaagttaaagacatctggatgagctttttctacttcgtcaagcaaaataaccgagtacggatgacgacgaaccttttcagataattgaccgccttcttcataaccgacatagcctggtgccgagccaattaatttgcttgaagcaatttggtccatatattcagacatatctagcctaatcaaattgtcttccgagccaaacattgctgctgcaactgacttagctagttctgtcttaccaacaccagttggacctaggaacaagaaggaaccaatcggacgacgttcatctttaatcccgcttctactacgacgaatagcacgggcaactgctgaaacagccttatcttgcccaataacacgttggtgtaaaatcttttccaggttagctagctgccgtgattcattgcgttccatctgggtaacagggacgccagtccagttggaaactactttagcgatatcttctggctcaaccacagctttagcactaactttgtcttctaacttctctaccattgcttcacgttgcatttctaagttgttctgctcatcctgcaattgagcagctttaacaaagttttgactagcggcagccatattcttttgcgtaatcagtttcttaatttgctcattaactttttctagctcagcatcattgctaatgttattacgaatcttaactgcggcactagcttcatctactaagtcaatcgccttatctggcaaaaagcgatccgaaatatagcgcgttgacaaatcaactgcatccttcaagctctcatcagaaatagtcacatgatggaacttttcatatttcgacttcaagccacgcataattgtcaaagtgtcatctcttgaaggctcacttaagcgcacttgttgaaaacgacgtgccaaagcttgatctttttcaatgtacttttgatattcattaaaagtagttgcaccaatcatttgaatatcgccacgagcaagcgaaggcttcaagatattagaagcatcaattgcaccttcagcaccaccagcaccaattaaagtatgcatttcatcaacaaagagaatgacattgccatccttggtgacttcgttcaggattttcttcattctgtcttcaaactcaccacgatacttagtcccagcaactaaactacctaaatttaaggccattacccgtttcttaagcatatcctgtggcacttttttgttgacaatctcagttgcaatcgcttcagcaacagcagtcttaccaactcctggttcaccaactaagacaggattattcttagtccgtcgagacaaaatttgaatcacacgcttaatttcttggtcacggccaatcaccggatcaatctcgccattacgcacacgttgatttaaattaaccgctaccttatctaagttaggagtagtgctcttgcgcttcttttgaccagtcgtcgtgttatcatcacccagccaattagctgaatcaccaaagtcttggtcttgactcaaactgtcttcaacatcctgctgcagacgaggaatatcaacattcaagtttttcaaaatcattgctgataaaacctgctcacttgcagtaattcccagcaaaacatgattagtgttaacttccttaactccatcgtcattagctcgtcttctagcataatccaaagctaaactcaaacgtggtgacatttccatgtagcttgccttaggggcagagccataacctgtataacgttcaatttcttcacgtactgcagttggtgttaatccccatgaacgcaagatttttcctgcttcaccgtcagtttcaattactagagccaataaaacatgttctgtgccaatcaagcgatgatgaaaattttgtgcttgttcacgtgcaattttcaatacttgattaacgctcttactatatgaattttccatacaaacaccaccctttaaaatacgttatggtattttacttttcttttgtcagtaagtaaaacaatttgacttatcttcaacttcattatgtccaattctaataattacgcaaaaattgctttcgctatttcagttaaatactttttatcaatttcgtcaaaattagctagcttggtgtaagtgtcaatgtttttgcggtagcctttaaaccattagtctaaccttaatttcttaaatatttatatgacttaaatttctgcttagcttgcttaaataactattgccagctacctgtgcggttaatgcgccatgctggatgcctaaatgaacttcatgacgcttctttaagctgtcacgggccgctgcttttaattcctgttcagtcaatacagttatttctgaatcttcaaactcgctgctaagccaaaattccagctctcgattcttgatgcagcttaagatcctaagcatgccttctgctccagattttgaccatttcttgccttgccccttaacacggtaggtatacttgcggtggttgctctcgcagcagccaatggctttagtcacagtcagttttcgtttcttaaacggcttaatatcgtcccaatgacgatcaatataattccttaggcgccccagataatcatgattgagctcggtattcaattcatcaattagtcggctttctgcagtggttaggatagttttaactttgtcatagctgtatttgtattccaaagcagaaatcagcttgccttgcaggtcaggcgcaaaatatagcctttctttgattttcttatttaggtgaaagacatccaagaaatgctcatgacgcttgcatagccctacaatgtcatcgaagtctgttttggcatatccagcaccgccatcggcgttgctaagaattacagtatcagaaagatcataagtattggccaggtactccttggcttcgttcagcgcatcaagtcggcttaaagaaacaaattccttggcattgattcgctttctgcgtttcttgcttatattgacaatgccttcacagacctgatagcgatgaaattccaaccggcttttagtgcctttgatcaccacgccatcgccttcaagatacaaaactgggacctttttcttagtgcctgcggcatcatatcttgaatctgcttcttggcccgctttaatatttttcccggccatttttaccaaattgcccacctgcatatggctaatattaaagccagacaggcaattgactgctagagcagtattgcgataagtggcaacgctgcttacttctaagatgtttttgactgctaaaatactgtagcgcttgtatttgtaaaagcccattaattcatccaagggataccttgcttgtttgcctgggcagacatatcttcttctgacatacctaacttcgccaaaagccatattgattgagcgctcattcttcttatcaatctgatagccctgtgctttaaccttggtaatcatttcatcatcaactttagctaaagccaaggccatgatttccttaatcaggtttaagaagaaacagattatttttctttcacgcttaatataattatcttcagactttataatatttgcgatttcagttacaattgaattcataaaagaccagcttctaatgtgttttttgttcttaacatcagactactggtctttttgtttgagctcaagtccaaattcaaaggacttgggcttttttaattatttattcaacttaccgtaaaaaattatacgcttagtagcttggtcgaatcaaaatcaaagacgccccaaagttttccctgattaaaaattgggacaacgatttccgaatttgaagcactatcacaagcaatgtgaccagcaaattcatgtacatccttaacaatctgcgttgtttttgcttgtgcagccgtaccacaaacaccttttcccatttgaatatgaacacatgctggcatcccctgaaatggacctaatatcagttcatcattttcatagcgataaacacctgcaaaattcacatcatttaacgaattaaacaaaagagcagataaattagctgtattagcaatccaatcatcttctccctcaatcaaagctctagcttgctccactaataatttgtatttttcttcagtagttgccgtcatttttaatctccctttaagttttaaaagatattataacaaaaagaaaaaagctacccaaacggatagcttgtatatcgggaaaatcggacttgaaccggcgacctctacgtcccgaacgtagcgctctaccaaactgagctatttcccgtaaaaaaagactcaccacttggtgagccttctatcttggagcggaagacgggattcgaacccgcgacccccaccatggcaaggtgatgttctaccactgaactacttccgcaacaacagatattattatagcaaatacatttttctttgcaagacctttttatcaaaaaagataaatttattttaggcacaaaaaagctcacattcgtgagctcttcatcttggagcggaagacgggattcgaacccgcgacccccaccatggcaaggtgatgttctaccactgaactacttccgcgacaacagatattattatagcaaatacatttttctttgcaagacctttttatcaaaaaagataaatttattttaggcacaaaaaaagctcacattcgtgagctcttcatcttggagcggaagacgggattcgaacccgcgacccccaccatggcaaggtgatgttctaccactgaactacttccgcgatacaaaaattattatagcaaagattattctctttgcaaatactttttgaaaaaatattacttatctgtttttaactaagttaattttagttattgtaccgaattaaaaaaattgctataatatcttcaatttaattaaaggagatttcacatgagattacgtactattgctttctaaatcaaaatcttaatattaggaagcgagaaaaacatgccaaaatttaatatcagagaatatcaaccaaacgattatgctgaagtatgtcgcattcacgacgttagtcgtaaagaagagctaacaattggtggtgcggaaaaatacttcatacctttagagacagctccatataaggatgattttttctcctgcaaaatttatgtagcttatgatgctgacagcatattgggcttcgttgcagttcatccccaagaactggattacatttatgtagatccaattcatcaaaataaaggtatcgggtatgctttagcaacgacagctttgagatacatgagtcgaccagttagtcttgatgtatttgcagaaaatactaaggccaaaaagctttacaaaaaattaggctttaagtgtcaagaagttagatatcagcaatgggatttaaatgatcctaaaaaatactctgatgaaaaaatgattctcaattaaaaaatatataaacacaaactcttatccatgcttaaaacatagataagagttttttaatttataagattacttattttctttattcttcttttccatatcagccttaacttcagcttctacgctttcaacacgttctggacgcattgttgggaacaaaagaacatcacgaatagctggagcatcagtcaaaagcattaccaaacggtcaataccgatacccaaaccacctgtaggtggcataccgtattccatagcacgaaggtaatcttcatcgatcatgtcagcttcgtcgttacctgcttcacgttcttccatttgagcttcgaaacgttcacgttggtcgtcaggatcgttcaattctgagaaggcgttaccgtattcttcacccatgatgtaaatttcgaaacgatcagtaaatcttggatcgtcagcattcttcttagcaagtggtgagatttctactgggtgaccgtaaacgaaggttgggtcaacaatagtttcttcacagtacttttcaaagaaggcgttaataatgtgaccaactttccagaacttttcaacgtggatgtcgtggtcttccgcaatcttagttgcttcttcaagagtcattggcttccagaagtcaacgccagtcttttccttgatcaagtcaaccatgtgaacgcgacggaatggcttgcctaagtcaatgtcagtaccttggtaagtgatcttaccgtcatctgaaacaaccttagctgcagcacggataataccttcagcttcatccataacatcatggtagtcccagtatgctgcgtaactttcaagttcagtaaattctgggttgtggtgagtgtccaaaccttcgtttctgaatacacggccgatttcgtaaacacgttccatatcaccaacaatcaaacgcttaagtggaagttccaaagcaattctcatgtaaaggttaatatccaaagcgttgtggtgagtaataaatggacgagcttcagcaccaccaggaatgttgtgaagtactggagtttcaacctccaagaagttttgactatttaagtagtcacgaatagcttgaatgatttgggtacggtgaacaaaacgcatgtaactatcatggttggtaatcaaatcaaggtaacgttgacgataaattgcctcaacgtcctttaaaccatggtacttatctggtaatggacgaagagcctttgataagaaagttacgtgaagggctctaatagtaagctctccagtatcagtcttcataacttcaccctcaatacctaagaaatcaccaatatcagatttcttaaagatcttgtagttatcttcgccaacaatatccttacgtacatagatttgaatcttaccagtacggtcgtaaagatcagcaaaaccaaccttacccttaccacgctttgcaagcatacgacctgcaatcttggtcttaggcatatcagcgtttaattcttctttatcttcgttgccatacttttcttctaaagtacttgccaaatcttgacgatcaaattttctttgaccaaatggttcaattccgttttcacgtaattcttccatcttctggcgacgaactattaattggtcattcatttcattctttgccaatttacttttcctccatttatttgttcattgtcgcgcgtcgtgcagcacgagcttcttctcttttttcatactcgtcaacaaaattatcaagcaaatcatatacttcttgacgcgtccagacctcatttattttagcacgagtacgggctgaacggggaattccctttaaataatacgcggcttgctgacgaaattctggtacagcacgcttttcaccgtgaattttaacaagtgcgtgaagctgatgtttagccgtttcaaccttctcacgaacagtttgcggcttcaatttttcaccagtttccagatagtgtaccatatctttcaaaatccaagggttacctaaagcagcgcgaccaaccattactgcagtacaaccgatctcatccaatgcttttttagctaattcgggtgttctaatatcaccattagccacaaaaggcacatctagcacctgggcaacatcatgtaatacttcccagtcagcttcaccttgatacatttgtttacgtgttctaccatgcatcgcaatcatgcttgcgcctgcttcttgagcagctaaagcattttctacagcaaaaatatgctttttatcccagcctgttctcattttaacagaaaccggctttttaacgttctgcactactgcgtgaaccatctgataaatcttgtttgaatcaagtagccacttcgaacctgcatcagtctttgttactttaggtacaggacaacccatattaatatcaataatatccgcatcggtatgttgatcaatatattgagcagcttgaagcaaagtttcctcgcttccgccaaagatttgaatgctcattgggtgttcacgcggatcaacatccatcatacttaatgtctttttatttccataaatgatcccatgatcagaaatcatttcgcagacaaccagccccgctccgaattccttacagacaacgcggaatgcagagtttgaaactcccgccatcggcgcaacaacaactcggtttggaatggtgatatcgcgaattttccagctgttattcaccaaatcatcctttcaaaattaccctattatgatatcaaaaaagccccgctggttaaaaccttagggctttatttgccttaataatctttatctttgttctttttagctaaaatatctttcaattcatcttctgaataatgatacttgttaccgcagaaattgcaagtaagttcggcaccatgatcttcattaatcattgctttcaattgatcgctcttcaaagtttccaaaataccagcatacttttctttagaacaatcacagttaaaggctacatcatctttttcaagaatcttacaatcggttcctaagattttacgtgctaagtcttctggtgtcattccatccaaaaatgaagttgagagtgctggcaatgcatcaattcgcttaatcgtttcatcgatcaaagcatcactagcaccaggaagtgcttgcaacataaagccaccagcttcaccgattgaattatttggattaacaaatactgacaaaccaacagctgacggaatttgttctgacttagtcaaatagtaagcaaaatcttcagcaatttcaccagaaacaattggtacctgacctgtgtatggttccttcaagccaaggtccttagttacttcaaaccatccttgtccaacagcttttttcacatcaatatgaccatttttcttaggtggtaaagcaatatgtggattcttaacataaccctttaccttcaaatcggaggtagctgtcacgatggttggaccaacagggccattgcctaataaacggactgtcaattcttccttatctgtcaattctgcaccagcaagtaaaagagatcctactaaagtacgaccaagcacagcagctgaagctgaccacaagtcatgccgcttttgtgcttcactcactacacccttagcggtaatggttaacaagcgtaagtttttagtcttatcaattgactttactaaataatcactcatttttatccttcttttctaaaaaaatagagcctgtgacaggccctacttttatttaattgtctttatgctcatcatctgcaggagtatcttgagttgaagtttcattttctgattgatccttttcgggattctcaggattattttcttcaacttcatgattcttttcagatggagtctccaaggtatctttttcttgatcagctaatgcttgatctgaatcctttttttctgccttttcaacttcgcgcttctctgcagcagccttagcttcttcataagttgaagcctttgattcactcggatattcatcttcgtctttttcaggcatcttaccagtcttatacaaggccataatttgcttttcattcaaggtttcatacttgagcaaagcttcggcaatgattctatgcttttctttgttgtccttaacgatctcaagggccttagcatgagcttcatccaaaatcttctttacagcttcatcaattttagctgaagttgcttcactatatggcttaaagccgtaaggattgctttcgccttccttttcaagctcaaccatacctaaggattcggtcataccatagttaactaccatgctatgcgcaatttgagtagcttgttcaaagtcgttagaagcaccagttgacttatcaccaatggttgcttcttcacctgcacgaccacccatcaaaccaacaatttgttcaaataattgctttttagtcaaaatgaattgatcatctttaggcaacatgatgttataaccaccagcacggccacgaggtacgatagtaactttacgtacagtacgtgagtcgcttaagaccaaaccacagattgagtgaccagcttcgtggaaagcaacacgtcttctttctttttcagaaatcaaacgatccttcttagctggaccggcaatcacacggtcttcggcttcatcaatatctgatgcagtaatctcagtaccattacgacgagcagcaactaatgcggcttcattcaagacgttagccaaatctgcacctacaaagccaggagtttgacgggcaacttccttcaaatcaacatcaggtgcaagcggcttgttcttagcgtgaacctttaaaatagcttcacgaccacgaacgtcaggacgacctaccaataccttacggtcaaaacgaccaggacgaagcaaagctgggtctaagacgtctgaacggttagtagcagcaatgacaataacaccttcatcgccttcaaaaccatccatttcaaccaataattggttcaaagtctgttcacgttcatcattaccaccgccggtgccattgccacgacgacgaccaatggcatcaatttcatcgataaagataatacttggtgcatttttcttggcattgttaaacaggtcacgtacacgactagcaccaacaccgacaaacatttcaacgaagtctgaacctgagattgaataaaatggcacgttagcttcaccagctacagcacgagcaagcaaagtcttaccagtaccgggaggaccctcaagtaaaacaccagatgggattcttgcacccaacttagtgtacttagatggatctttcaaaaattcaactacttcgactaattcttgtttttcttcttcttcaccggctacgtcagagaaacgaaccttattcttagaaggatcttctggcttgacgtgtgaacgaccgaaattcattattccgccgccaccaccacgtccagcgccaccttggttcatcatcatccaaagcatgacgataaacaaaacggttggcacaagcatgacaatggtcgaaatccaattgccagattgtgattctccttgagttgtcatccgagcattacttttttgtgccaagttttgcacgttagaaacggtagaatcattctgtaacatggtagtagagaagcgcgaaacttttctacttgaattattactaaagaaatcaaaactattatttgattgattctttgttgtttgtgcagtcttgtaactacctgaaacagtgtaaacaccattagcaggttgaacactaaagtttttaactttgccttgacgcaaatctttaacaaattgtgagtaactgatattctctgagctaccactattgttagagccgccgagtgcccagttgattccccataggagcagaaggaacacaactatatagaaaaggccgtttgaaagtagccgattccggttattcttcataaaaaacctccgcaaagtctttaagttatacgtttaaaattctatcacaaattagcttgcaaccactaacattttcacctattttgaagacttcttaataaatgtataggaaataatgtttaccatctgtgataaagtcctgtttttgataacatttttctacaaaaacaggttcattttcagcataaattgtaatgcagcaagagcgcaaggcaaagggaattgccttttctgaaaatttctttttcgccttaactcgttgaccatttttcaacaataatttgctagcaggtactagacttcccgcagtaaaatgtgcatccctttccagccaaaagcttcctatttctttcaaatcagcttgcctatcagtagttagtaaataataagctccgttgaattcaaattgctgatttagttcgatactaaatggctgcacaattttctgtggcttattttcaactaaataactataaccttgataatcaatcacctcaaaattgcccaaattttcatttacccggcgatgatatttttgccagattatcttttgccaaaaaatatttttttcttctgtagataaatcatttaagttgtccgttttaattcgccaagcacccaaaaatggctcaaccgttctcatactattcaactgctcatccgccaaatccgtcaattgactcattttttcactaaaacgcagtgcattactaattaaattaggattctcctcttttaataatggcaccacatgatgacgcagtcgatttcgaacagtctcatcctccgtattagttgaatctattacatagtcaatttcacgctcttgatcatattcgagtaattcttgcttactataggctaatagtggtctaagcaaaacaacgccatgcatagagccgatatcttgcaaactattcatctcttcaggatttcccgagcgaataaatttgagcaaaatattttctagcaaatcatcaccatgatgcgcagttaataaatagttcattcgctcgctatgagcaacattagtcaaaaaatgatatcgtgcctctcgcgccgctgcctcaattcccgtttggggctgatcatgtttatcccacttgccattaaacaggcaaatcttcttttgagcacaataattttgcaaaacttctacttcatatgagctatccgcacgcaattgatgatcaaaatgtgccgcaaaaacagtaaaacttagttgtttttgcaaattaactagcatatctagtaaagccatggaatccggtcccgcacttgcggctactaatagtcttttatcctttaagtcaatctgatgttgttcaaaaaaatcattaattttcattatttttctaacaaaaaatggccctttcggaccatctcttaattctcagttaatacttgctttagcttttcaatttcttctttagcatcccgcgttgtttgattcaggacttgatcaaaatcagctggctttgtcttagaaaattgattatcatggtcaactaattccggatcattcactcgagtgatcgataaattaaatctccctttatggatgtgcaccacaaccacgcgcacttcatcgccagcatgataacgacgacgttcgcgtagccaattattgccaaagtcactatgatgaaccaaaccagaatgccgattaggtaaagtaacaaagatgcccaagtcagtaatgttattaattacaccagtcacccgattaccagcttgatacttttccattagttatcatcatttctttcatgcacgttataaatcttctcatttgatttagaataatagaatttataacgaatcagcttagcaacataatttggatccttcaaatcctgcttttcagtttctaagtcatttctcttattttttactttagttaaagtctgtttttcagcttgtacttgattattcagtcgtccagtttgagaaatcttgattgcaatctgtacacctaaagcaacgaaaatgatagcaaaaactgccataattacgttcaaccgcttgcggtgtgtttctttctctaatttagcctgtttacgtctaagacgcgccctctgctcttctggactcaacgaattatatatacgtggaccatgattcattgtttaatcccctaattactaaataactatactaagtcaagtataacaacgatttaatcaaaagtcattaatcaactagctcgtacagttcacttgcttctgcttttttcgtggtctcgcgaatatttaacaccttagccttgatggttttggcgccgtaacctacttcaataatatcatcaatttttacatcgtagcttgattttacaactcgaccattgactttgattctaccttgatcagccatttctttagctacggttcttctcttaactaatcgtgaaacttttaaaaatttatcaatcctcatatttttctcctacagttacctttgtacaatgtcgcttgctgcctgtaaaaagattgccagttcattgaataaaacacgattcttcattttatccggcaacaatagcaagacaaccattcttttttcttgattcatactaatgcgagcctttaagcttacatgctccaatgccttaaaaatattaggtccctcaagttcgcgtgaagctgcattcgtaaattccactttaatcttatcgtcagttttaaccacattgagcacttgagccatgtcagcatcaacctttagaccggcaacagctaataaattctcgacggccgttggatagtcaccaaaacgatcgattaattcatcttcaattttacctaattcttcctgacttgagacggctttaatctttttgtaaaattcaattttttcttcttgatcaccgatatacgaatctggaatataagcctcaagtccaaggtcgatttctgcgtttgactttttgactgttgtcttccccttacggtcttgaattgcatcagccagcatttgtgagtacaaatcataaccaacgctatcaataaagccgtgctgttgtgcacccagcatatttccagcaccacgaattgataagtcacgcattgctattttgaaaccagaacccagttcagtgaagtcacggatcgcatcaagccgtttttcaccaacctcagttaaaactttatttggcttatacaagaagtaagcataagccaaacgagcactacggccaattctaccccgcaattgatacaactgacttagaccatagtggtcagcatcttcaatgatcattgtattgacattgggcatatcaattcctgtttcaataatcgtagtcgtaaccaagatatcaaactcgcgattcaggaagcgataaagaatatcttccaactgattctgactcattcgaccatgggcagctgcaattcgcgcctgtggcatcaattcctgcagtttttcgacagtttcatcgatatcactaatccgattatgtaaataaaagacctgtccatcacgttgcatttcacgcaagcatgcatcccttactacactaggaatttgttccatcacataagtttgaatagggtatctgttttgaggtggcgtttccattactgagagatcacgcacacctaccattgacatatgaagcgttcgcggtattggcgtagctgttaatgtcaaaacatcaatatttgccttcaactgctttaacttttccttgtgcttaacgccaaaccgctgctcctcgtcaacaattaacaatcctagattcttgaattttacatcttgagacaaaatacggtgagtcccaacaaccaaatctatcttgccattttttagtccttcaataatttcctttgattcaactggcgtttgaaaacgagatagcatagcagtattgactgggaaatctttgaagcgatcttgaatcgtctcatagtgttgttgcgccaaaatagtggtgggtactaaaaaggctacttgtttattatcctgaattgccttaaaagctgctcgtaaggctacctcagtttttccaaaaccaacatcccctactaaaagacggtccattggcttcgagctttccatatcttgcttaatttctttaaccgatcgcaattgatcaggtgtttctggataaggaaaggcatcttcaaattgtttttgtagatcatcatcaggtgaaaaagcaaagcctttttctgattcacgtttggcataaagttcaatcaaatcatccgcaatatcttcaactttagattgaaccttacgcttggttttagcccactcactaccacctagcttattaatatgtggtgtcttaccttctgaaccaacgtatttttgtactaagcttaattgatctgctggtacaaaaagctgatcaccatgctggtaggtaatcgtaatatagtcacgcttggtaccattattttctaaagtcttgattccttcaaaccgaccaatcccgtggttaacatgaacaacataatcccctggcttcagttcagtataattgcgcaaacgctgggcattctccagtgtcttaattctttttttacgttgtgggcgcttattaaatagttcacgctccgttagatataccaatttaactgttggtaaactaaagccactaacaaagccatcaactacaatttgtgtccgttgttcaacaatttcgtctgcaccaacaattggtaaatttaagccaaaatcaaccattgtttgatcaatttgctgtgctcttttttcattatcagcctgtaaaatgacggtttgccccgccttttgataagattctaattctgacttaatcagcggcatttgactaaagaattgttctggctcacgtgttgaccaattgagcatctggcctaagcgcagtcgtcccatgcttcgttgaaacaatgagaaataaatacgatggtgcttatctttgctcagaatctttgtataatctgaccgcaagctttgccctggcaacattgcaccagtttttagttcatcattaataaaagcagcgttttgcttatcaactgtttcaaccgcttgattaattaaaggcaaatcgtcaaataaaatctgcccatttttaggcaaatattcgagtaaactactagaaatttcaagcaaatagtcaattaagaaagcatagtttttaggtaaaccgccatcgtttaattcatcaagaactgccgcaaagtggtccttgacagctttagcgggagctggtgcactggccatatcttgttcaattttcttagccgctgccgcaattgcatccttagtaaaaactcgatcttgagctgctgcaacttctactttgtctaactctttttgactccgttgactagctaaatcgaattccttaattgtatctatttcgtcaccaaagaattcgattcgcacgggattttctcgatctagtggataaacatctaaaatatcaccacggatggcgaattcgcctggccgtgctaccaaagaatcacgctgataccctgaagcaagcaaccattcattgagttcttttagttcatattcttgacctggctcaaaactccgctttgcctgcgcaaaatcagttggattggtcagtttgtattgcagcccctgcggcgttgttaccactattcctgccttaccacttaacaaaaaattaagtgcctgaattcggctgctcagttcatcaggcgaactaactgccgtttgcgttgcaattgtagcatctactggaaaaatttgcacagtttcatctgccataatggcactgagttcaccatataagttttgtgctttactttcgttttcttcaattaaaataagtggagctgctaatttagttgttatctgttttagcaatagactaaaagcaccggcattagcgccagtgattagtgaattttttacttgttttgtttttgaaataaaattatttaaatcttgatctttatctaaaatctctgttaaacgcattttaattatatttattcattaaatattgactaccatgtccgctgataaagtcgtcaataatatctacacttatcgcaaatgcatcatccatcaatttttgttgttcatcattaaatggtgtcaaaacccatgaaacaaccgttgcatttttcggatgacgaataccaatcttcaaacgattaaacttttccgtccctaaatctcgaatgatgcttttaattccattatgtccaccagatttgccattagctctaattctaattttaccaattggcatatccatatcatcttgaataattagcacatctgctggatcaaccttaaagaagttagccacttgactaactgaacgacctgattcattcataaaggtttgcggctcaagcaaaattacatcttcaccatttattttttgcttagtccaatgaccttcaaatttatctttatccagtgacaaacccttttcattcaaataatgatccattgtcatgaaaccagtattatgctttgttttatcatatttttgtcctggattacctaaacctgcaattatcttcattatttttactcctcactatgcacacaatcttacatataatagcacaattaggaaataataattttattaatgcttgctatcatggtataattcattttgttaaaaatatcactaataaaaaaggagatttttatttatgccaagagatgaaagacctcgtaaagttattcttgttggtgatggtgctgtaggttcaaccttcgcattctcaatggtacaacaaggtatcgccgaagaattgggtattattgatatcgctaaggaacacgttgaaggtgacgcaattgacttagctgatgctaccccttggacttcaccaaagaatatctatgcagctgactaccctgactgtaaggatgcagacttagtagttatcactgctggtgctccacaaaagccaggcgaaactcgtcttgaccttgttaacaagaacttgaagattttatcatcaatcgttgaaccagttgttgaatcaggctttgaaggtattttcttagttgttgctaacccagttgatattttaacccacgcaacttggaaaatgtcaggtttccctaaggatcgtgttatcggttcaggtacttcacttgatactggtcgtcttcaaaaggttatcggtgaaatggaacatgttgacccacgttcagttaatgcttacatgcttggtgaacacggtgatactgaattcccagcatggagctacaacaatgttggtggcgtaaaggttagtgactgggttaaggctcacggtatggatgaatctaagcttgaagacatccacaaggaagttgctaacatggcttacgaaataattaacaagaagggtgctactttctacggaatcggtactgcttcagcaatgatcgctaaggctatcttgaacgatgaacaccgtgtacttccactttcagttcctatggacggtcaatatggcttacatgacattcacattggtactcctgcagttgttggccgtaagggtcttgaacaaatcattgaaatgccattaagtgacaaggaacaagaattgatgactgcttctgcagatcaattgaagaaggttatggacaaggcatttaaggaaactggcgttaaggttcgtcaataatctaaaacttgtttcacttaaaagcatctcttttttcggagatgcttttttatttgtctaactattgttaaaatatagttgttacttcagatgaactttaattaatatttaattaactcatcaactatgctataattacttgaaacatttctcactttcggaggcgaactcatgcttattaaatctttagttattaaaaaagattatttaacaacagttaatgaaaaagccacattagcagaagctttaaaagttttagaagattcaggctacagatgtgtgccaatcgttgacgatactggtactattttccgtggtaacatttataagatgcatatctaccgtcataagtcacaaggtggcgatatgaatctaccagtaacttacttacttaagaatgccactaagacaattaaggtcaattcaccattcttcaaggtatttttcaacattaaggacttgccttatattgctgtccttgatgaagataatcatttttatggtattcttactcactcaagaatgcttgatatgttgtcagatgcgtgggatgttaaaaatggttcatacgttttgaccgttttatctgacaatacacgtggtaacttgatcaagatgtccaagattgtgtctaagcacactaatatgtctagtgtaatgacacttgatgcagctgctggcgaactcgaaggtaattttgttagaagaacactctttactctccccgctggtgtctcagatattaccatgagaacgattgttgataagttacaaagaaaaggtttcgtagtttctgaaatcgaagatttgcaagccggcatgactattatgagtgatgaaaatccaggtgtctttattgaacaccctgttaaggattaaaaaactgatctaccaaaaagtgtctgggaaaaaactaagtctcagatcatgaaaaaagaacgttgaatttttgttcaatgtcattaagttaagacattgacaaattgaatctaatctctgtagaaccgaatcattatgatttggttctttttttgcataaaataaaggcgaaaagaacctaccttttcgccctctgattaaattattaaaccttcaaaattattgccagaaagctggtgttaattatgaaagcccttcacagaaatattttagatcgtcttgatcaaattatcaatgatactggaaagcatattcatgattttatcgatgatcctcatgccttcactaggaagcggtttttagatgcagctacagtcattaaaactactattaatatgcaaggaaaagatttgaccagtgagttgtttagagcttttggccaaaaagctattaaaaataacgataaagtagtcagtacttccgcttatgtccaacgcaaaggtcagctttcacccgcatgttttaagcatattctaactgtatttaatcagaatttatttaatatccagttatttgatcataaatatcgtatatttgccattgatgggtctgattttaatcaaatctggaatcctaaatcagagaatatcgttggaaatctcaatcataaaggaaagccatattgccaaattcatgttaatgcactctatgacctgttaaataatacttatcaagactgcatctttcagcctaagtcaaagatggatgaacgtaaagccgccgttcaaatgcttaaaaagctaaattgcggaccatatatagttactatggatcgaggttataccggctttaacatgattgaaaattgtaatcgcctgcctaactgttattatgtcatacgtactaaaacgggatatggcgcatttaaggaagtagctgagttgcctaatcaagagtgtgataaggatatagcttgctgggtgactacctctaattattattatgaaacccataaggctacagaaaacgttcatttggttaaccatcattaccgtcaatatataaaatatcggtctaaaaataccaaagatggcagctgggactttggagagttatgtacaataaaatttcgtgcctgtaaatttagaattaatgatcctaaatcaggcaaagaagaatgggaagttgttctaactaatctaaatagagccgattatcccttaaaaaggatcaaagaaatctaccatttgcgctggggcattgaaacttcattcaaaaagttgaaatatgctttaggtagcgtacagtttcattccaagcaggatagatttattgaaatggagatctatgcccacatgattatgtttaacgcagtcagtcaaattgatgctcaagcatatgtaccacaaaaaaaatgcaagtatcaatatgcgatcaatttcaaacagtcatgttttgtcatccaggctatgtatataatttcttcttcaactgaaatctttaaaaagattcttattcaaattagtcattacacaattccgatcagaccaggacgaaaagacaaaagaaatctcaaacccaaatcagctgtatattatttatatcgtgtagcctaatttctaaacaagatttgggtttatttggcatgaaaaaagagcattcaaatgcgataaatcgcaaatgaatgatcttaaaagtccaagtcgataatttgtcaatgtcttaacttaatgacattgaatttttgtttcaacgctctttttgtatacttttagctccagccttgatattattaaatcatcacaaaataaaaacaaaaaggtggaaactaacatgtacaaaaattatatcacaggtcaaactgctttaacacttaatctagattttgccattccggccaatcatttggctaatgtcatcagctggtttgtagattcaattccagaagatgttttagtaggcaagactgctaaaacgggccgcccagcctatcatccagccatgatgctcaaaatactgctttttgcttactccagaagagttttttctggcagaaagattgagttgatgctggaagaaaatctgccaatgatgatcttggctgaccagcaaaagatttcatatcatactatcaataattttagatcaagcagccatgccaatgaactgattaaaaagagctttatctacttcactaacctgttagaagatgaaggcttaatcaatgaaggtgctgcttttatcgatggtactaagattgaagctgatgctaaccgctatacatttgtctggcgcaaagcggttgaaaagtatcatgaaaagctgaaaggccaggcagttgaactttatgatgaattgattactaaagaagtagtcaaagaaatggaaaaagaaaaagttcaaactagtcaggggctaaaggaattagctcaagaaactgaagcagaaattaacaagctgactaaagagattgagcaggaaaacaaagccattcctggcggttcacctcgaaaagccaagcgacgtggactaaaaaagattctgcaccggctaagaaaagattatgtgccaagaatgcaaaaatatgaagaagccgaagagatctttgccggacgcaacagttattccaaaacagatcatgacgccacctttatgcatatgaaggaagaccacatgaaaaatggtcaattaaagcctggctacaatattcaagcagtcacgaccgatcaatatgtagttgattatgccatctttcctaatccgacagatttcaaaactttggagccggttttggatcaaatgaccgtgttggacaagtttgacaaaatcgtcgccgatgctggctatggcagtgaatacaattattcgatgctggaggaaaaatatccagacaagaagtactttattccctacactatgtatgaaaaagaacagaccaaaaagtataagaatgatccaactaagctaatcaactggtactacaatgaaaaagatgattattacattgatcatcatggcgtcagattcaatttcaaatattacagccagcgtaaggatcgttctactggtcaggtccgtgattttaaggtttatgaggcagacgagttccagctaacgccagaattggaacaattggctaaaacagctagcggccgccagcgccaagttcgctataatcctaactggcaatatttaaaagaaaaagcaaaagaagttctccaaagcgaagaaggcagacacatctatggcatgagaaaatatgatgtagagccagttttcggacatttgaagaacgtatttggcatgcgcagaacgcacctgcgaggtaaagagaaggtcgaaaccgatatcggaattgcctttatgatgatgaatttgaacaaatattgtcaaagaaggtggctgaagggccgatttttattgttaaaaattttaaagagaacaaaaaaacgatcaagattcttaaaaaaggaaatcttgatcgtttttattcatctggaagctagttttttcccagacacttttttattgcctaacttatttttcatagtaaacacgaggtaaacgatcgtttaacaaacatgctacttcatagtgaatagtatcaacataatctgcggcggccttaatattatttggcgctgttggatcattggaaatgatgactaccttagttcctaacggcattttctttggcattttgaccataaattgatccatacaaattcggccgacaattggacagtattcgtctccaactttaactttaaagccttgaaactttctaataaagccatcagcatagccaacaggcacagttccaataattgtatcttgatcagctacaaaggtagaaccatatcctactccgtcaccttcatgaatagtttttacatgagttagttcactctcaaatgataatgctggttcaagcgaaattgatgacttcaagtcaggactatcaggattagaggatgggttcaaaccataaatgccaattccaaaacgaacacaatcactaggcacatccttgttaaagatgctggcagcggtattgtctacgtgaatccacttaggcttaactgtcaacaaacttctcatatgagcaaatttttctacctgatgcttaaagtaagtatcatcagcactgtctgcggaagcaaagtgtgcgaacataccctctacgtagaaattatcgttattttgtaagaatttattagcagcaataaaatcctcatcttcgttaaagccgatccgacccatgcctgaatctactccaatatgaactttcaactgtaactgctctttttcaaggtacttttctgcttcctttagccattcaaggttaggaatcgttaatgaaacattgtttgcggccgcaattggagcgtattctggagaaactactcccaaaactaaaattggcttaacaatgtcagcatgacgcaattgcaaggcctcatctaaaatagctacacaaaggcctgctgcaccttcctcaatcgcaattttagccacctcaactgcaccatgaccataagcattggccttaactacagctaacatcttttgccctgttgcaagatgtttcatttcgttttttatatttcttctaattgcgcccaaatttacctttacaacggctggacggtgatagcctggaaccatatttttatttttcctccaaaactacaaatgtaataatttcatgattatcatgtgtgatacttgggaaaatatttccatcaaacttagttgaagtcataacgggatgacctaaatcatcccataaagtttcgacatcttgaaaaccaatatactttcccagacccgttctcattgctttagaaaaagattcctttaatgaaaagcgtccgcctaggtattcaactttacgtttgcctgccattttttgatattgatcaaattctttgggagttaatacttttttggcaaaagcatcccccttgtccacgatcttcttaactcgttcaacttcaatcgagtcaattcctactcctttaatcattattttcacctcacacaatgacatcattataatacaaaaaagaagctgtaaaaattacaacttccctttttaagataaaatcctaatctttcttattcttgattacaaattcatgtccgttgccacgaccacgcttaccgcggtttccattttggcggtatgaattattgttactacgacggcggtggttatcgcgtccatgattattattgctacggccatgacctttaccacgacggcggcgaccatcacccttgtatggtaacggcttttctggggtaatcttgactttaacctcatctttagccaagttctttaaaaaggctgcaactaagtcgagagctgaatagttatccagcagctcacttgccccttgggtatatttacccaaatcaccgttcatcaaatcttcaatttcaatttttgcttgctttaattgaccatgtaatgcctgatcatctgttggcggacgaagcggcgacatcttctttttagtcaattgctcaatggttctcatatagccaatctcgtttggcgtaacaaaagtaacagagattccattttgccccgcacgaccagttctaccaatacggtgaacatatgaatccggatcttggggaatatcataattataaacgtgggttacgcctgaaatatcaagtccgcgggcagctacatcagtagcaaccagaatatctagcttaccttcacgaaatcttttcaaaactgacattctacgcgcttgcgatagatcaccgtgaatttccgccgcattgtagccacgcgcttgcaaaccgcgcgtaagttcatctacgcgacgtttggtgcgaccaaagactaaagccaaatctggaccctgcacgtcaattagtcgacacataatatcaaatttttcagactctttagcacgaacaaaatattgttcaatcaaatcagcagttaattccttagctttaatgcggacaatttctgggtgatccataaatttttcgcctatccgcaaaattggcttaggcattgtagcactaaagagtaatgtctgttgtcggttcttagcatatttcaaaatactttcgatatcttgaataaaacccatatcgagcatttcatctgcttcatctagaacgacagccttaacttgatctaaattaatagttttgcgtttcaagtggtcaagcaaacgccctggcgtaccaactaaaattgacggtacatggtgtttcaatgagcgaatttgacgaccgatatcagctccaccatagaccacttgaacatgagcatgttcgtcacgacctaaacggaataattcttcttgcgtctgaatagcaagttcacgcgttggttcaataataaccgcttgaattgctttttcttttttgtcgatcatctgtaaaattggcaagccaaacgcagctgtcttaccggtaccagtctgggcctgaccaattacatctttgccttgcaaagcaaggggaatagtttgttcttggattggagttgcttcttcaaagcctgaacgtttaatcgctttaagaagcgcatcatttaatcctaattctgaaaatttcaaaaaaatttttctcctatctcagtcgggctaagacattttctaggtgcattccatgcgaacctttcaatactacaatgtcatccgacttaatatcgttcttcagatcatcaatcattcgatctgtttgttcttgtgtataataatgcaaatgttctggctcatatttgccttgtaaagcatcatataaattcttcatttcagagccatataagtaaacttcgttaataatctggggatccattgtatctgcaagaccagcatgcaattccggcgactttttacctaattcaagcatatcacctaaaacagcaattctacgaccaccatcttttacttcaacttggccaaaactagtcaatacagctctaacagcagttggatttgagttatagatatcactcatgatgctttcgccagcatcgcctttttcccactccatccgattagccgttggggtaaagttagacaatgatgaggcaatttcctcatcactttcaccaaaatgacgaccaacactaattgcggccattgcgttagaaacattgtgtttaccaatcattgggattgagaatttttgctctgaatcattaactgtaaaggtagcatgatgcatataactcttaaagccagttgcatgaactgtatcttcatctctaaaaccaaaagttgctttagcttgatccaatttctcagcacgttcttgcaataatggttcatccccattgaagataaattcgccatcttcacgcaaaaagtcagtaatttccatcttagcatctgcaatcttgtcgcggctgccaaagaattcaatatgagcttcaccaatcattgtaattacggccacatctggatgggttaattcacttaaatgatgcaattgacctggtctgtccattcccatttcaagcaccaaaatttcagtatttggcttcatctcaagaatggtcattggcacaccaatctcattgttaaagttggcctgagttttatgtacattaaagcgtttagacaaaacagcagcaatcatatccttggtagtagtcttaccatttgaaccagtaattcccactacggttggattaaccttacgcaaataatagcgagcaagctcttgcatagcagcaagtggatcatcaacttcaataaccgcaatatcttctgacttgttcggatgcccctttttccataaagtagcagaagcaccattattaatagcactagctatgaattcgtgcccatcacgttcaccttcaagtggtacaaataatccaccatctgtgatctttctggagtcaaaggcaacagaagtaataacagtttgattgtcaccttcacaagtagtatttaaagccttggcaatttccgccatttgcattttcattgaatatttactcccataaaaacatttttatacagaaaacattatactgtctttcatgcattctgccaaataatctctaacgaaaaaagcagccccaatgggactgcttccaccagataaaaggtttacttcttcaaaccgtacttcttgttgaacttttcgattcgaccatctgcttgagcaaacttttgcttgccagtgtagaatgggtgtgaatctgatgaaacttcaacacgtactaatgggtaagtttcgccttcgtagtcaatagtttctgatggcttcaaagttgagccagctaagaacttagcaccagttgctgagtccatgaaaactacttcttgaaattctggatgaataccttgtttcataatttattactcctttgccatgatcatatcacagatcatagattaatcgattaacgataactagaataacatcttcaagttagtaattcaagttctttttaattttagcttatttaattgccactgcaaatgcttcataaggcttaagcgtaatatcatgcagatcattacgcacagcataattactaagcaagttttctttaatgcgatcggtcgacgtaaactgttgctcttcaccagataggttagcaaccaccaaccacttttcagtacctaaaatacgataatatgcaagaacttcatcaccagtatcatgaaccaacttaaagtcaccattaaccacaatctcattttcatgacgtaaagtaatcaattcttggtaagtataaaaaatcgaattaggatcagccaaggccttcttcacattaatttctttgtagttaggatttactgtcaaccatggctttgacttagtaaagccggcatttttctcatcattccattgcattggacgacgagcattatccctgcctttaacattgatcgcatgaattagtttatctttgtcataaccttcagccagacgttcatgatacatattgacactttcaatatcttctacttcatcaatattttttaccggacaattagtcataccaatttcttcaccgttaaaaatatatggtgtgccgtgcatcaaatgtaaaactgtcgcaaacatcttagcacactgcacccgatattttttatcattgccccaacgtgaaattacgcgcggaatatcatgattttcccagaacaaactattccaagcatgattaaaatcaagctctgtctgccactttgctaaaacctttttcaattcgcctaagtctagcggctttaaatcccacttttcttttccttcctgctggtctaaagcttgattctcaaattggaaaaccattgataattcatgacgtgctggatctgagtactcttctgcaatcttcggtgtcgcattccaagtttcgcccaccgtcatcacatctcgatcaccaaatgtattcttgttcatttcttgcaaatatagatgaagcatcggaccattttcacggatcattttgtcgggatctttaccaattaattcaatcacatccattcggaagccaccgatccccttatcaagccaaaagttcatcatatcgtagattttttgccgcaactctggatttttccaatttaaatcaggttgttgttccgcaaagaagtgtaaataatattgtcctgtttgctcatcaaatttccaagctgaaccagaaaaagcagacttcaaactattgggctcatgtccatcaacaggatcacgccaaatataatagtctcggtaaggattatccttactttttcgtgcctccacaaaccattgatgctggtcagatgtatgattaaccaccagatccattacaattcggatatgatgctccttagctttctgaatcaactcatccatatcagccatcgtgccatattgcggatcaatcgcttcataatttgaaatatcatagccattatccacaccgggagattgatagaccggtgaaagccaaattgcatcaactcctagattttccaaataatctaaacgagcaataattccttgtaagtcacctatgccatcaccgttgctgtcctgaaatgacttaggataaatttgataaacaactgcttttttccaccatggtgtcattttttctacctcgtaaatttcaaatttattgttaaacataatataaataatttatgtaagcacttgcaagaaatggtaaactgttaacggtatcaaattttagtgaggtaattagatgactactcttccctttaaggccgttgctgtagacgttgacggtacttttgttaacgatgaaaaacaatacgatcatcaaatgtttagcgagattttaactcgtctgcatcaacacggggcacattttattattgctagcggccgcccagctggtcgtttggctgatgactttagcgaatttatcgattctattgactttgttgccgacaatggtgcggtcttagttcgcgatggaaaaattattcgtacaacaagcttttcaaaaaaatgcatcctaaattttattgaatatttgcacgcacgctatcctggtgcagcccaaaacattttaattagtggcgttaagcactcctactttttaaaaagtacaccaccagaatacaagcggtcccatcattatttttatcctaatagcatcgaaattgatgattttaataaaattcctgctgatgaccaatacactaagatcacaatggactatcccagcaagattcgacatgaattagaacatggcttcaacagccgtagtacagaaaaaatccacgtcacaactagtggttggagctacatggatattattcctgaaggtgtaaataaagccgcagggctaaaggaatttttagcttatttagacgtgccaagaagtgaattaattgccttcggtgatggtgaaaatgaccttgaaatgttgaaatttgctggtttaagttatgccatggctaatggtcaagatatcgttaaaaagactgctaaatttattgcacctactaataacgacaacggtgttttcaaggtgctaaataagtatcttgatgaagcagaatagcgaacaaaaaactgttgagactaaaaatcccaacagtttttttacttattctttattttgcgcaattttttcagcataaggatcgattttctttaaccctgtcttaattccccaataatagaaggcgagagaaataatgataattactacaaagtcaaatggatacttaatccagttctgaccaccaaaaccgctactgcccacaaaggacataagtgacataaaaatcaaataaccgatcatccaccaactactatgtaattgttcttttaaatttgaatgttggtagtgaatttcataataaaaataaatcggcaaacccaaggcaataacaattatcacctgaatagtcgttggccacattgaccagtaaattgccaaactagttagtataaaggtaactggagctagccacttcatataaccaggattaaatggacgatcaagatctggtcttttctttcttagagtcattaccgtaactggaccagtcaaatatgcaatcaaagttgaggccgtgattactgttgctagtaaattccagtttctaaataagcttactaaaataaccgccaaaacaaagtcagcaatcatcgcataacgtggtattaagtatttttgattcaatctacctaaccattttggcaaatgacgtgtgtgtgtcattgccgctagggctcttgaggccgtagctacaaatgctacccctgtcccaaatggtgaaacaaatgcatctaggtagagcaaaatcactagccaattaatgcctaaaataatagcaatgtccgcaaatggtgaggtaaagttgatcccatgccagcctactttagctaacatgcctggctcaactgcaccaataaacgtcacttgcaacataatgtagattgccgcagtaattaacattgagatcaataccccacgcacaatattcttacgcggatttttcaattccccacccatattgatgaccgtctgaaaggcatcataagacataataattcctgaaacagaagttgcttcaaaaatggaccgactaccataaggcataaattcatgtaaattactgccaaagttttgtccatgaaaacctgaagcaattaaaactgtaatcgtcaaagtaggcaataagatcttaaaaatagaaatcaaattggtaaaatgggtcatgattttaactgacccaaaattgatcattgtaaaaatcagcataaaaataataaccacacctaagccagcaaaagtaatactgccgtttttaataaaatttttagtccagttagcccagctccagggccaagaacccatatattgcacggcagctacggcttccatcggtaccaatgtgactagtgaaatccagttagcccaagcagccacaaagcccaataacggcccatgactatattgagcgtatcgactcatcccgccactttcgggaaacatcgaacctaattctacataagtcaatgcaattgagatgataattactgcacctaaaatccaagataaaattgcggctggacctgcaatttgtgctgcagaacctgaaccaaaaagccagcccgaaccaattaaagaattcaaggccagcataatcgctgaaaataagcctattttatgtctttttaacttttccaaataatcacgtttccttcactcttaactccattatttttaattttttattataacaaaagccgccccagctgagaactaggacggctaaattctgctacacaaattattcaattggatgttttttagttaatgcctgaacttcttctttaacgtgggcaatcgttgcgggattttctggatcagataaaatttcaataatcatttccgcagtcttcttagcatctgcttcatcaaagccacgactagtaattactggcgtaccaatccgcaacccactagtaacaaatggtgaacgttgatcgcctggaattgattctttgttggtagtgatgtgaacagagtcgagtaaattttgagcatctttaccggtaataccagtcttagtaatatcgataatcatcaaatggttatcagtaccaccagatacgacacgaatattgtccgattcagcaaaagtttctgccattgccttagcatttttaatgacttgcttaatataatctgtaaattgtggttgcaagtcctcataaaatgcttgcgctttacctgcgatgacatgctcaagtggcccaccttgaatgcctgggaacaaagcggaattgattttcttaccaatttctaaattgttggacaaaatcatcccaccacgagggccacgcaaggtcttatgtgtagttgtagttactacatcagctactggaacaggacttggatgttgaccggttgctactaagccagcaatatgagccatatcaaccattaagtatgccccaacttcatctgcaatttcacggaacttttgccaatcaatgatgcggctgtacgcagaagcaccggctacaattaacttaggtttaaccttaagagcaatttcacgaatggcatcaaaatctagttcttcagtctcaacatttaggccgtaactgtaagacttatattccttaccactgaagttaaccttggatccatgagtcaagtgaccgccagcatccatgcccatacctaaaatgacatcacctggcttcaaaagtgcttgataaactgccatgttagcctgtgatccagagtgtggctgcacattagcaaactttgcgttaaacaatttttttgcataatcaatagccagttgctcaacttgatcaatatattgacaaccgccgtaataacgccgaccaggatatccttcagcatacttgttagttaaaacagaaccttgtgcttcacgaactgcatcagaaacaatattttcagaggcaattaattcgatggtgtcttgttggcgctgttcttcatgatgaatggcatcccataatgcgggagatttttctgcatatttcattgataaaaagacttcctttctaatcaacactgatagtttttcttatagttaaagtatactatttagcaatcagatatgcacgattactacgcggaaattcctttttaaaagccgctaaaactgcatgacggccaacagctggatcagtcaattcatattcctgcgtaaagttcaaatagccatcttcagttaaaattagctttttaccatcatttttcacactaattgaacgatccttttttgccgttaataatttaatttctacatatttacttttattactacacatttttttgagcaaagtctctgcctgcttaattggaattaaacgcataatgacttcctttcagaacagtttctaattcatgactaaaactatccttctgtaaattagaggtaatcaaaagaactagtacttgctcatcctttactgcaaaagcgactctcgctgaacccgcttttttcaaatttaggcgaaactcgtaaattgattttcccttaatccgagtcattgcagcgatcttcactttagtcataccagttgccaattccttagtaatcgcttgatcgattaactgcttaattatcttttgctcattcttatgctttttaaaaaaggttttgcatccccgctcataatgaaatttcaatagcatcattttctaaatcaatccatttccataatagcaaaacatagatactcactttttgaaaacttgttattttcatctaaaataaaaccgcttgtagtataatctacaagcggctcaatattatgagacatcatgcttagcttttaccatagctaagcatgttttcgtatacaactaattacttttaaataattaccttataacaacgtccgagttaagcataacactattcagtatagctttaaacgcctttattataggctaatagccacttaattatagtaaactgtaaaaaataaactatttcatttttctatcctaatcaaaatgtaacacactaggatcaaatgacttagtatctttaacgccagtatataacatcatttgtgcaagctgctcattcattttcttaatcttatcttctgttgctttttgtccgtcttttaacaattcagaaagaatcccgcgaccaatcagtacagcatctgcgcctaaggccaaagccttgtatgcatcgtagccagtcatcaatgatccatctacaaaaatggtcattccactgccatttagtgcttgcttgattgctggcaaaacttttagtggcggcacgccaaatggaacgcggccgtggtgatgtgaaacaactattgccttggcaccagcatctctagccttaacggcatcacgcacggatagcacgcccttagccacaaacggcagtttaactgcatgaacatacttttcaagatcgctaaatgaaatcggtcctagtggaataccatcgactacatcatatttaccattatcaccaggcacatgatcaatatccattccaacagctacggcacctaattcttctgcttgttttagttcgcccataattttatcatggtctgcgtaaggcttcacaattctaactgtatcgccgccctctttgacaatttcggcatattcttcgtttgactccatgccaatccaatttaaagtattggtattcttagccgcacgtgccttttcttgcattggcttacgcgtcttatctggtaaaaccctgttcaaatgagagactgcagccagagttaaaggtgaggcatattttttaccaaaaatctcagttgttaagtctggctcaactgaatcaagcaaacgcatctccaccaagatattgtctaagtaggcacgattatgtacattagcatcgtcagcacgcccacttgttacaggaatcatacctttaggacccggccatgggctttttactttttcttcttgattctctatcaaagaagcaccagttactgcatcgtttttttcgttcataaaaatacctccctaattattcttttgtctaaaactatagctcacttttgtcaaacaggcagataaatacgcacttactaaaatgacaggagccaactctattggtaataacagaatcaataaaatagctgttaataaaggtttacccaagataactgcaatacttgcactaactgtaatggctacacacataactggcataattggtaaaaattgcgcaatcgctgcgccaactgctacactagcaaaaatcgaagggaaaatttttccaccacgccagcctaaactaaaacctatattagtagacaaggttttgatgactgctataactagcaaaaataatggtgagatttgcaacgcctggtgtacaaatggaacaatttgaaattcaccagaatacagggcataactagtaattaaggtaagtaatgcaagaactattccccatatagttgctttaataatcggtgaaatagtaatttttttagcaaaataatcactccatttttcgctccataagaaaaacataccgaagctccaacctacaattaatagaataattacatacatactatagcgccattgccagagaatatggcgatgatgaataccaaataatccttcttcagggaataatttaaagactattgctgcaccaaccacgccgatcataaccataattaagcaaaaaactttttgatacaattttgatttaaaaaggctactaaattttggcagtttttttagttgttttttcgaaacgatagtatcccaaaaatgattccatttccaatcagaagaataagcaattagtcgtaatctatctcccagccaattaaccatgccacttcctagtacagtagttgaagcctctggtccaatactgccacccgcggctaaagaaataagacctaaggttaaggatttccaccaattgtgataattgatctttccctcctgcttaacactcattaaaacttcttcgatagttaatggatatgatcctaaacgcttaattaatataccaataatgaaaccaaaaggaatacaaataaaaaacggtaaagcctgactaggaacaggtaatttatcaaacaaaacatgccagacaaaattaataataaaattaattaagtttaaatatgtagcacagcatattccaataataaaactccaaatggtagcataataaaatatattaagtttcttcattaggattttttccgaaactgtcaaatcttttgtgtaaatagatctttctcgtaaattgattttttaattatttatttaatcaaagtaggattctaaggtgtcctgaacctgaccaaagcctttatgaattcgattgaaataacggtcattgtagctcattgcctgaatgccaataaaagcatcaagcgactgttcagttggaaactctgccttaggcttagctttgcgcttgatcacattgttaaatgattcaatcatgttagtcgaataaattgaagctctgatctgcttgggatagttataaaagaccagcagatctggttctatgtctttcaagcttctgataacatggctgtaaaccttgccccatttggtatagaagtcatgcaggacagctgtggcttcttctttgtttgtctgttgatgcacctgtttgaattcgttcatgatcttttcacgatcgtcgacgcgtactttagcgcagatattgcgcatgacatgaaccaaacagcgttgaaaatgagctttaggataagtcctggccaaggctgttttcatgccaacaacaccatcagaaagaaaaagctcaacttgctttaagcctcgggatttcatgttttgaagcatatctgtccagacttcaatgttctcgctaggtgcaatgcagtagtcaatgacctccttgtgcccattaggcttgatgccaatggcaatatagactgcttcacgctcaaatgtttctcggcgcaaaggaaggtatgtcgcatccaaatagacgcagaaaaacttgtcgcttagcttgcgtttgtggtaagcctcaacctttggaatcatctgcttggaaatatttgatacctgagctggactgtaatggctgccatacatcttttcaattagatcggctatgtccctggtggtcacgcccttggagtaaagcttgataatcatgctttccaagatatccgagtgctgcttgtagtcaggcagcgtgtgctgatgaaactgaccgttgcggtctcgaggcacttgcacttcaattggtccaaactgcgtatcaactttgcggaaataagcaccatttctagagttgccagtattccagccatttctggcatagggatcatagcccagaaaggcagtcaattcagcttctaacaagttattaacagcctgttgtagctctttgcgcaataaatcatttattttgtctggattgaatagagcttgagcaaaatctttggtaaaatcattcatgaaggagttcttctttctgtatgtgtttttttgttcaaaccaatcatacgagaaaggaactcctttttctaatgtttaaagaaataaatttaaggaatcattcatccttacacaaactattttacagtctcttttttccttctctaattctcaagaattgaaatttctttttaaaaattataaacttttatactcgtaaagcaaaaatatagttaaaatactggtataatatcgtttcagaataattaatgtagaggtgagatttctgatcatgaaaagtgcaaattacactagaaaacatcacatgtatttaatgaatcacaaaaatggtgacgttatcgaagtaagaatggataagaaaaataagacattcaagaaaatacgactttatcgtcaagatggtttgggcaactactatctagatccacatgcggagtttaaggatcagaaaagtccagcaaccaaagagaatatcgtagaagccggaaaaaaggtcagcgatcatatctctagtgctgagaactggcaccataaagttagacctattttcaacgctgaacacaaaatcgtcgatttcgaaccacgattgcatttggaacaccatactaagattcaaaatgctaaaagatatttgcgtcacttggaaagacgacacgcagacttcattttccgtaaaaatagcaaaacgcctttgttaatcccatggaattacatcaaggatatgatctatgaagatcgcaataaagaaatggttctagcccataaggtgcacaagttaagaaaatagtctaaataaagtgtctgggaaaaactcagaaattaagaaatcctaataaatcttggtatcaataaaccttgatttattaggatttttttgagtgaaagtctaaaattaattaaaaataaactttttcccagacactttgttagagtaaaaatttagtattttacgcgttcaccttttttaacaatggtcaacatactacagaaagagttcaaccatgtcggtttacgagagtagctttttgatgcttttgttggctttgctgacttacatcgaccaccacaaaaaataatattaagctttcttaattctaaacaataagatttctacccaagataattgtaaattataactatctatttatactgaagataatggctatttaatacttatggaggaaccaatgaaaaaatattctacactacaaaaattcaatgccttggtccaaatccaaacaattattatctcggctctgccatatattatcggctcggtgatggctagctactattatcacaactttaatctagtctattcattatggctatttttagctgtgatttgctttcatttagcagttaatggtcataatcaatacacagattacgcacgttataagcaaaaccatataactagctacaacaatatcctagagaaatttaatattacgaaaagctgggctcgaaaaataatcattattttgacgttaatttctgcaattatcggaactatccttagcattaaagtcggttggattattttattaatcgggattttaagctatctaatcggctattgctactcaggtggcccttaccccattttaaaaactccttttggtgaaccagcttcaggaattacaatgggctacaacattacatttttaggcctatatatcaacatgtataacgtgcatcccttcgataattttttctgggctaaagccattatcgttgctggaccggcaatttttgtcattgccaatgtcatgttagccaacaacatctgcgatgtgactgaagatgtcaaaatcggacgtaaaaccttgccctactatacaggtcgaaaaactgccctgactattttatgttgttactatgtattagcctacatctttttaatattggtaatagtattaaaatatttgccagttattactttagggagtttacttactattccgcttgtttaccacacaactaagactttcgtaaaaaatccacataaagaatcaacctttacaggcatcttagtaaatgttctattagtactaattagtgaaattattttctcgcttgttgggttggcaatataaaaataaataaagcccgcaaatttaatcaatgtcattaagttaagctattgacattggagaaaaaaacaattaaagcatcatttggctttagatagccaatttgatgcttttttgcgtatgctaaataagcgtagtttgtatttcttttttaattaggccacgcgatacatgtaatatactgcagacttggcttttaaatttcgtttgtcttttcgcctttatttttgcaaaaaaaagaatcgaatccaaatgattcgattcctaaaaagatcagttttcaaaagtcaatagcttaacttaatgacattggaagtctaattctaggtcatttttctttaaagaaagcagtaaatgattacgagctggcttagactttttagcttttggctcacgaacaagagggacgattagctttttttctgacatatgaataacctccaaaatattgataaattaatcataattgaaatctaaaactaatctagatactcggttattttacgcttacgtagaatcttgttttcatttcacacaaaaaggcgatcaaaaacaatttttcaaaagttttcgatcgtctttttaaatctgagaattaactttctctagatacttttaccaatagaatttataaaaaactattataaattattctttatcgcgcttcttcttaaatacgaatagaccaagtgaagctaaaagcataccaagcacacccaaaattgaagtatctttagtgcctgtttgtggtaatgtctttaagctagtagccttgttattaccaatggcattatcactttcacccttaacacctaggttgttaccagcgtttgcgatgctgccattagcagtagaagctcccttaactccatcagcttgactagagtttgaaccattcttatgtgaatgatgcttgcttccaggaacatcttcgcttttagcagcgatgactaaatcagtaccagcaatgacatcctttgaaccatctgggtaagttactgtagttgtaccatcatcgcctactgtaataactgtgcctgctgggaacttatccttgttggcattatcgacgttgttcttaacttgattcttttcatcatcagttaagtgacttggatccttaacagttaccttgccacctggaatagttggcgtaatgttaccagcatcagttgtgtcgcccttttggccttgaactaattggtcacctggtatggtgtcttgtgaaccatctgggtatttaatcgttgctgtaccatcatcgcctactgtaacttcagtgcctgctgggaacttatccttgttggcattatcaacgttatccttaacctgattcttttcatcatcagttaagtgacttgggtccttaacagttaccttgccacctggaatagttggcgtaatgttaccagcatcagttgtgtcgcccttttggccttgaactaattggtcacctggtatgatgtcttgtgaaccatctgggtaggtaattgttgctgtaccatcattgcctactataacttcagtgcctgctgggaacttatccttgttagcattatcgacattattcttaacttgattcttttcatcatcagttaagtgacttggatccttgactgttactttgtcgcctggaatatttggtgtgatattgccagcgtctgtttgtcctgaagttgagccgctatcttcacccttaactaatttatcaccagggattgtatcagttgacgtatctgggtaggtaattgttgctgtaccatcatcgcctactgtaataactgtgcctgctgggaacttatccttgttagcattatcgacgttgttcttaacttgattcttttcatcatcagttaaatgacttgggtccttgactgtaactttatcgcctggaatatttggtgtgatattgtcagcgtcgttttctggacgtaccaaatctccacctgggattgtatcctttgaaccatctgggtaggtaatcgttgcgttacccttgtcatcgacatcaatcgtacctggcagatctggatttactttgccgacctcatccttaaccttatccttgtcatctttagttaagtgttctggatcttttactggtactctgtcgtctgggttctttggtccttttggatcgtatttatctgcgtcgttttctggacgtaccaaatccccacctgggattttatcctttgaaccatctgggtattttattgttgctgtaccgtcatcgccaactgcaacttctgtaccctttggaagatctggatttactgtgccgacttcacccttaaccttatccttatcaccatcagttaactggtctggatcttttactgggactctatcatctggattctctggtccatgtggatcatgcctgtcagcgtcgttttctggacgtaccaaatccccacctgggattttatcctttgaaccatctgggtaagtaatcgttgcattacccttatcatcgactgtaacttctgtaccctttggaagatctgggtttactatgccgacttcacccttaaccttatccttatcaccatcagttaagtggtctggatcttttactgggactctatcatctgggttctttggtccttttggatcgtatttatctgcgtcgttttctggacgtaccaaatccccacctgggattttatcctttgaaccatctgggtattttattgttgctgtaccgtcatcgcctactgtaacttctgtaccctttggaagatctggatttactgtgccgacttcacccttagccttatccttatcaccatcagttaagtggtctggatcttttactgggactctatcatctgggctctttgggccttttggatcatacttgtccttatcttcttgacgtaccaaatctccacctgggattgtatcctttgaaccatctgggtaggtaatcgttgcattacccttatcatcgacatcaatcgtacctggcagatctggattttctttgccgatttcatccttaaccttatccttatcaccatcagttaagtggtctggatcttttactgggactctatcatctgggttctttggaccttttggatcatttttatcagcgtctttttctggacgtaccaaatccccacctgggattttatcctttgaaccatctgagtagataatcgttgcgttacccttatcatcgactgtaacttctgtatcctttggaagatctggatttactttgccaacttcacccttaacattatccttatcaccaccagttaagtggtctggattttttactgggactctatcatctggattctctggtccatgtggatcatatttatcactttgatttggctgaacctttacagtgactgtagttctagtagttgaaccatctgggaaagtagtttcaactacacctgtacgattaccagttgttgaagtatcagggggagttacccatttatgtgtagttccatctgggaaactagctggttgaccatctggagtttgagcaacaactgttctttctggatcaacttggctacctcttggaacagttacaccatctctaggtgcaaccttgtattcatcacttttaccattaacatgaacagttacagttactggatcagatttgctgtgatctggatctggataagttacagttacttcgccagttacatccttaccagcttgactaaagtcaggtttcttagtccattctactattgagttttctggtaaagtagtcttattaccatcagcatcctttacatcgatagcatcttgtggagctaatgtaccgttcttatctaccttaagaccatctttgccatagatgtggtacttttccttgtcatctagcttatccttgacgttaatagttacaggaacttcatcttggctttcatcactgtaagttacttttactacaccagatgcctcaccagttttacttgtgtctggttcagtcttccaagtgtattttgcatcacttggcatcttcttaccattcttatcagtgcttgaaattacttcatcagccttaggcgttttgccaacagttgtagtccaaggttgggcttgtggatcataagtttctgcatcagtctttacatgaattgtaacatcagtgtctttcttagatccatctaggaaggtaacttcaacactaccagttttatcacctggagtagtcaagtcaggctttgcgccatccttccagtcaattgaacctgctggtagttgtacttgcttgccatctggatcggttactgttactaagctagctggatctacatcttctcccttatcaactgaaacttcattattaggagttacagtgtagctttctgcatcttttttaacattaatcttaacaggtactatatcagaaactgtcaaatcttttgtgtaaatagatctttctcgtaaattgattttttaattatttatttaatcaaagtaggattctaaggtgtcctgaacctgaccaaagcctttatgaattcgattgaaataacggtcattgtagctcattgcctgaatgccaataaaagcatcaagcgactgttcagttggaaactctgccttaggcttagctttgcgcttgatcacattgttaaatgattcaatcatgttagtcgaataaattgaagctctgatctgcttgggatagttataaaagaccagcagatctggttctatgtctttcaagcttctgataacatggctgtaaaccttgccccatttggtatagaagtcatgcaggacagctgtggcttcttctttgtttgtctgttgatgcacctgtttgaattcgttcatgatcttttcacgatcgtcgacgcgtactttagcgcagatattgcgcatgacatgaaccaaacagcgttgaaaatgagctttaggataagtcctggccaaggctgttttcatgccaacaacaccatcagaaagaaaaagctcaacttgctttaagcctcgggatttcatgttttgaagcatatctgtccagacttcaatgttctcgctaggtgcaatgcagtagtcaatgacctccttgtgcccattaggcttgatgccaatggcaatatagactgcttcacgctcaaatgtttctcggcgcaaaggaaggtatgtcgcatccaaatagacgcagaaaaacttgtcgcttagcttgcgtttgtggtaagcctcaacctttggaatcatctgcttggaaatatttgatacctgagctggactgtaatggctgccatacatcttttcaattagatcggctatgtccctggtggtcacgcccttggagtaaagcttgataatcatgctttccaagatatccgagtgctgcttgtagtcaggcagcgtgtgctgatgaaactgaccgttgcggtctcgaggcacttgcacttcaattggtccaaactgggtatcaaccttgcggaaataagcaccatttctagaattgccagtattccagccatttctggcatagggatcatagcctagaaaggcagtcaattcagcttctagcaagttattaacagcctgttgtagctctttgcgcaataaatcatttattttgtctggattgaatagagcttgagcaaaatctttggtaaaatcattcatgaaggagttcttctttctgtatgtgttttttttgttcaaaccaatcatacgagaaaggaactcctttttctaatgtttaaagaaataaatttaaggaatcattcatccttacacaaactattttacagtctcttgtacttgtcagcatcgccttttattttaacagttacaggtacttcatcagcactatcatcattatatgtaactattacttttggactaatagatcctggcttacttgtatctggagtacccgaccaagaataactttttacattagtcaaactatccttattggtaattgcattagcggcatcagttgaatctaatgcatgtcccttttcaatagtaatggtaccaccgaccggagagttaacctcattatcctttggcttgacaccattaagttcgttccaagcatcattttcatctttagtaagctgttctaccgtcgcttgatctgcataggtacctgtatctttgttaatcaaagctttagttacttcagttgcattgtcataagctgcctttttatctggacttgcgtatttatagcgatcagatttctttgttgtatcttccttgtgatcagcaaaactgccatcaggatcatactgtccgatactattaccaagatttttcatagcatcgtttaaggaatttccttctttaataatgttatttacagcatcagagtctgtaatgttatttagaattttattccgcaaaacattaatttgagcattatttaaatagtctttcttaatctcatccagagctctagtggcatcaacccaaccagaaataacatctttaggtgtttttggtgcaccagctggatccagtgctctctgctcaccatataagctagacatcatgctatagtaccaattctgataagaataaatattagctgcgattcctgagaattgttgatttttcgaacctgtagttaattctacttcatgagagtctgtgtgttgcgtagtaaaggaaataacataagaagaaaattgtgcattactagtgacaccttgtgacttaaatgacattgcttggttaaagttatcactgctatatacgccattagaattagctacaccgtttttagaatttaacctataccccagtttgtcataaatgattgggtctttatattttgcaccgtcaactccagtttcatttgcaattttaaaagtattaaaatgaaagtcatgattgccacctagataaggggacccatcatatgcattcttacgttcatcagcatctttaaagtaagtctgccataagttcttagcaccaacatcagtagcagtagtgaaatagtatgggccttgcaaatattgattgttataagctggcatggtttcactattaattaaaccagtatttggatcaacatctgtcttaggattaaatgaaaagtctttttcagtttttagattttgtattggaaattcagtagcgctagtgctaccgggctcaaatgtataagattcaaatgtttgattaggattactaattactttcatgtcaacattaccaacgatttggtagtcagaagtgagggcaataccaaattttgcagaacttaacccacttaatttactgccaacattttgtaatcccttattagggaagaaaacaaccttccaacgggtcttaccatttcctaaatcttctttagaaatattgatattatttttagtatcttcagctgtttgtttaggatcccccttaaaatcagcaccactagcttgaatatcagcagcacggtaaacgtagtcctgaccataaatagttacaatcttgtaataatttccatctgtacctttatagatattagaactgtagttatctgaagaagttagattagccttattggccaattcttgattttctttagctagctgagtattaatgttattttgatctactgtacctgctgcatttctgtcagaaccagaagttaccataaaattcgtagctgctaatcttgctgctgatcttgctgctaatgatctaatataagtgtgagcgctaccttgcgtctttggtaaagattgtgaggttgtcgcagcttctgtagaattattagccgttgcattgttacttgcactaccttgcgtttctggtgaagattgtggggttgtcgcagcttctgtagaattattagctgttgcattgttacttgcactaccttgcgtctctggtgaactattggaagttttaacgctttctatggttgctgcctttacagaatgatttgtaaagttaattccaaaaatggttactcctaataataccgaagccacaccaacgctaaacttacgcaaactataacgcggtgtccgcttagtttctaaaaatttaagttgcttcatcgttatttttgcctcccaaatttaataactagtggtatttttaaatccgacaacattatagcacggtttagcgactttgatgacggcttggctcttttttctgtttgcagtcaacttaccagatagtaaaagagactaaccgccaaggctaatctcttttcaaacggcagattgcaagaaataacttgaacaaagttagtgacgcagattacgcaaaaagatctcaattagtgtgcgccagtttaaacatttgagtggcctggagttcaaataccagttaatttgaattaactcatcatcagtgattttctcaatcggttgacctttgggataaagcgtcgtagtactcggttgcgattctcattactgccccattcatgtggagaataagcatgcgcaaagtataggggaatcctggcctgcttttcaattagcttgtagttagcgaattctttcccatggtcaacagtaaggggcttgagattatcttctaactggttagctaattctaaaatggccttggttattgaggtactatctcgtccctgaagccgtttaacgatgataagacgactcttacgctcgacaaacgtagctattgcttgacctttacgctttccagataaaactgtatctgcttcaaagtgacctgaggtatgacggtcaataacttcagcgggacgatcttcaatggaacgtccatggctaaaagtcccacgggtttctttggctcgtcggcggcgaattccatggtcaggtaaatcagccacgccaatatccaatactccttgctcaatccagttgtagatggtcttgtaggcgattctaactacatgagccacttgttcaatcgaccatttttgtcactgaatacataatactttctaactgtgattgaatatcggcgaactgattttgtaagatactcaattgtgatgatgttttagtacctgtaatacccatcaacgcctctgacaatggtaggcgaccttcagcagacagcttggttaataacgctgatacaacgtcagtattaccttgcttccattcatttctggctttctcatttcatctttaatcatctgccgaattgcaacagaattactcttcacatcgagcagtttcttcactttatcaaaatctgctaattcatcttcatcaagtcgactttgaattagctcatcctttaacggcttcatcgtgcaatgaccccctcatgtttgccgtcccggcaaaataaattttcagccttcggttgcgaccgatcagatattgcattcgagaatgagtaccttgagatttcattcaaggtcatttcgagatttcatatctgatttacttatgttttcgtcataagtaacaacaacgatcaaacagactgctccgtttggatttcagcatttcttttgtggcaacaaagagaaaaaaaatgccccacttatcaaatgacaataagtaggacaacagtcacttacttttcaacaaaagtaagcaaaatattcaattttcggtagacaaccccaaaataacgaacaggtaatagtagcgtttaatgcactattcatgctgattaaaatcaacttctaccggtagaaaaacggtagacaacttgctttcaaccggtactttccactaatattgaccctattcaaatgccgtcatattgggattttctcttcttattaaggtacgaaattattcccactcaatagttgaaggtggcttactcgtcacatcgtaaactacgcggttaacgttatctacttcattgacgattctatctgaaatgtgaccaagtacatcccatggaatttgggcaaaatctgcagtcatcccatcaattgaggttacggcacgaataccaatcgtatagtcataagtacgtccatcgcccattactccaacggagcgaatacctggaagaacagtgaagtattgccagatcttttcttgtaaacctgccttcttgatttcttctcgtaaaatcgcatcagaatcacgcacaatcttaagcttgtcttcagtcacttcaccaagaacacggataccaagaccagggcctgggaatggctgacgccatactaagtcatgtggaatgcccagcttttcaccaagttcacgtacttcgtccttgaacaacttacgcagtggttcaatcagcttgaaatgcatgtccttaggaagaccaccaacgttgtgatgggacttaatcgtttgggcagtgttggtacctgactcgataacatcagtataaagcgtaccttgagctaagaaatctacatcctttaacttcttagcttcttcgttaaagacctcgatgaattccttaccgataatcttacgcttcttttcaggatcagttacacctttcaacttgtctaagaatctcttttgggcattaacccgaatgatgttaacaccaagatccttgttcaaggcttgcattacttgattgccttcgtctttacgcagcattccgtgatcaacaaaaattgcagttaattgatcgccgattgctttgtgtaaaagagtagcagtaacgctagaatctacaccacccgaaagacctaagatgactttcttgtcgccaacttccttacgaatatcatcaaccttcatgtcgatgaagtcgttcatggtccagttagcctcagcaccacaaacctcaaaagcaaagtgcttcaagatgtctaaaccgtattctgaattgcgcacttctgcgtggaattgaatgccataaaactttttatctggattagcaattgcagcaattggacagtttttgcttgaggcagttacttcgaagccctttggagcttgagttaccaaatcaccgtgactcatccaaacgtattgctttgaaggcaagccattgaacaaaatactgtctggatcttcaaccgtaatgttggcgcggccatattccttgttttcagcttgttcaactttaccgcctaagtcatgagacattaattgcatcccgtaacaaatacccaaaattggaatatccaacttaaagattgcaggatcaacctttaatgcaccattatcgtaaacactgttaggaccacctgagaaaatgattcccttaggattgatctgtttaatcttctccatggaaagatcgtgtggtaaaagttcagaatagatgccgaagtcacgaatacggcgggtaattaattggttatattgactaccgaagtcaagcacaataattttatcaaaatcgtctagattcttagccactatttactccctcttttcaattacgcatttttaactaactctactaggaaaaattaaaaaggtcaatcaaaaagttaaaaatagccattcattgttcggcttttatcttgagcaaccagcagttgcaactactagttgcgctaaatgcaattaaaaagtggtggtctgcaaccgcaaattttcgttaaatcaaattatttcaaaacgaaaggacgatcaatcatgagattaggtcaaaaaattgcggcattacacaagaaaaatcatctttttcaagaagcactagctgaaaagatgaatgtcagtcggcaagctgtatccaaatgggaaagtgaacaatcaattcccgatattgaaaaaattgtagctttatcagaattatttggagtgaccaccgattatttactcaaaagcggctcaccttcttttgaattaaaccacaaagataataacttaactgaagaattgccaattttatctgatcaacaagagcaaggctacttaacagctgctcaaaaaagtgccagccttcgcgctttagccattagtttaattattcgcagtccagccatcctttgcttttctactgccctagctattatgcttgacctgggcaatttaacaatccaattaaccggctgtcgcaagattatgaacaaatacgccacactctattggttaatagcagtcttactttatctaggatatagcttcattaccaatgattgggaacgcagctggatcatctggccaatcgcggggatcttatatggcattatcgaaaagatcatcagtctgtgccataacgatatcgcagctgaataatttttactataatcgaacattaatccttaattttccacttgtgttcggcaatatattctgttaagattaagccaacacaaatatctatatatcgtcgaaataaggtcgacagtctctacccggtaccgtaaataccggactataggtgaatgaaagttaagaataatcttaaggacttcttttacctgttttaggtagaagaagtccttatttctttcttgaggagaataatattgaaggaattagtagatcgaattaaacaagatggtgaagttttacctggaaatgtgcttaaaattaattcatttttgaatcaccaagttgatccgcaactaatgatgcatgttggtgaagaatttgcccgcctttttaaagatgaaaaagtcgataaggtcttaacttgtgaagcgtccgggattgctcctggtgtcatggcagcctaccaactgcacgtgccaatgatctttgccagaaagaaaaagccgtctactttgaatgatgcagtttattgggctgacgtcttttcttacaccaagaaggtcaacaataagatctgcgttgaagagaaatttttgcacccaggcgaacatatcttaatcatcgatgacttcgttgcccacggtgaagcagtcaaaggcatggttaacattgctaaacaagccggctgcgacattgttggagttggtgctgttgttgcaaaaaccttccaaggcggaagcgaatgggtagaaaacgaaggcttacgctttgaagccctagcaaaaatcgatagctttgaaaatgatcaagtacacttcgagggagaagaataattaaaaatggcacaaaaagaagttagtcacaaaaaagctgctgtcctaggtttgcagcatttgctggcaatgtactccggtgcagttgccgttccccttttaattggtacggcactacacttcaatagcacacagatgacttacctagtttcgattgatatcttcatgtgtggtttagccactttaattcaactattccgtaataaatatttcggcattggcttgccagtcgttttgggctgtgcaattcaagcggtagctcccttagaaatgatcgggcagaagttttcaattaacacgatgtatggtgccattatcgttgctggaatctttgttttcttaattgccggatggttttcaaaaatcaaaaaactcttcccgccagtagttactgggaccttaattacagttattggactaactttgattcccgtggcctttcaaaacatgggtggcggaaatgcccaagccaaggactttggtgatgcgaaaaatcttattgctgcctttatcaccatcctcatcatcgttgtcattgaagtctgggctaaaggattcttacgttccatttccgttttaattggattaattgttggtactctaatcgctagctgcatgggacttgtttcattaaagccagttgccgaagcttcttggttccatttgcctcaatttttctacttcggggtgccagaattcgaatggtcatcttgtttgaccatgatcatcattgccttagtttccttggtcgaatccactggcgtcttctttgccattggcgacctacttcatcaagatatcaccgaagaagacctcaaaaaaggttatcgtgcagaaggattagcacaaatcttcggcgggcttttcaacaccttcccttacactactttttctcaaaatgtcggcttgcttcaattatccggcattaagactaagcgtccgatttactgggctgctggcttattaatggccatgggcttacttcctaaaatcggtgctctagttaccatcattcctgactcagttttaggcggagccatgttggtcatgttcacaatgattgccgtgcaaggaatcaaaatgttaaccaaagttgattttgagaacaaccgcaatattctaattgtcgccatttcaatcgggatgggattgggcgttactgtctatcctcaaatcttccaaactctcccccaaaccattcaattgttcttaggcaacggtatcgtcgtagccagcatctgtgcaactctgcttaatcttttattcaatggaagaagtggtgccaataagtaaaataccttttcatttcataattccatatcataattttctataaatattcacgaacgaccgcttaatggagactgtaaaatagtttgtgtaaggatgaatgattccttaaatttgtttctttaaacattagaaaaaggagttcctttctcgtatgattggtttgaacaaaaaaacacatacagaaagaagaactccttcatgaatgattttaccaaagattttgctcaagctctattcaatccagacaaaataaatgatttattgcgcaaagagctacaacaggctgttaataacttgctagaagctgagttgactgcctttctaggctatgatccctatgccagaaatggctggaatactggcaattctagaaatggtgcttatttccgcaaggttgatacccagtttggaccaattgaagtgcaagtgcctcgagaccgcaacggtcagtttcatcagcacacgctgcctgactacaagcagcactctgatgttttggaaagcacgattatcaagctctactccaaaggcgtaactaccagagaaatcgctgacttgattgagaaaatgtatggcagtcattatagtccagctcaagtatcaaatatttccaagcagatgctccccaaggttgaggcttatcacaagcgcaagctaagcgacaagtttttctgtgtctatttggatgcgacataccttcctttgcgccgagaaacgtttgagcgtgaagcagtctatattgccattggcatcaagcctaatgggcacaaggaggtcattgactactgcattgcacctagcgagaacattgaagtctggacagatatgcttcaaaacatgaaatcccgaggcttaaagcaagttgagctttttctttctgatggtgttgttggcatgaaaacagccttggccaggacttatcctaaagctcattttcaacgctgcttggttcatgtcatgcgcaatatctgtgctaaagtccgggtggatgaccgcgaaaagatcatgaacgaattcaagcagatacatcaacagacaagcaaaaaagaagctgcagctgtcttgcacaaattctatgccagatggaataaagcttatagcaatgtcatcaaaggtttgaaggaaattgagcccgatctgctggtcttctacaattatcccaaacaaatcagagcttcaatttattcaaccaatatgattgaatcctttaacaacgtcatcaagcgtaaagctaagcctaaggcagaatttccaactgaacagtcgcttgatgcatttattggcatccaggcaatgagctacaatgaccgctatttcaaccgaattcataaaggctttggtcaggttcaggataccttagaatcttattttgaataaataattaaaaaatcaatttgcgagaaagaactatttacacaaaagatttgacagtttcgcttaatgtggtcgtttttcattcttcaccttttaagcaaaatctcttctataatagaagtaacataatttttcaacagtgaggaagtctatgcctaacttaaataaccaaaatcttgatagctacatcatgttttatggtcgacaaaaatgtcagcccgatgaattctttcaaggtgacaatcttcgtaaaaacgatattttttattacattattagcggaactggtacctttacttctagtagacaccacgcagttaaattaaaagctggcgatcttttttacgttccacgcagtcaaacttgttcctttcaagctgaccacaatgaaccctgggaatacttctggattggcctagctggcaacggcgttaatgaaagcatcaaggcatcaaatttacctaataaaaatttcttgcgtcaaattcaaaaaactgccttttatcaaaccctagatgacctttatcaatgtttggcgaagaaaaagaccttattaaacaatttaaaaatttcagctttaacttatcaacttttttatcatctagtaaaagactttcctaaccatccaccagtccgcaaaacacctaaaaatgatcaatatcaaatcgctattaattatcttaatcaaaattataccgatcctacctgcaatattgttgaactttgtcataggctaggagtatcacgcagctttttatatgctttgttcagaaaaaacactaaattatcgccgcaaaagtacctcatgcaattgcgcatggaagccgctaaaaaagaattaattaataccaagcacaatctaaggcaagttgctcaaaaagtcggctacggcgatgaatttaccttctccaaggcatttaaacgctatagcggtgttagtccaaatgcctttcggggaaattaattatattctttgccttatcggattatttttgcatacaatattattaggaaataatttaaacataataaaagtaaaggaatgatccaatgaaacaaacagaatgtactactattttagttggtaaaaaagcaactattgatggctctacgatgatcgctcgtagtgaagacggtggtcgcgtcatcatccctgaaggctttaaagctgttaacccagctgaccaacctaagcactacactagtgtaatttctaaacaaaagattgacgacgctgatttagcagaaacaccattacgctatacttcagcacctgatgtttcaggcaaaaatggtatttggggcgcagctggaattaacgctgaaaatgtagccatgaccgctactgaaaccatcactactaattcacgcatccaaggtgttgacccattacttgatccaagtgaaggtggtcttggtgaagaagatttcgtcactttgactttaccatacttgcactcagcttttgacggtgttaaacgtgtcggctatttagttgaaaaatacggtacttatgaaatgaacggtatggccttttctgataaggataacatttggtaccttgaaactatcggtggtcatcattggattgcacgccgtatcccagatgatgcatatgttattgcaccaaaccgtttgaatattgatactttcgacttcaacgattctgataattttgcttgttcagcagacctaaaggatttaatcgaagaatatcacttgaatccagaccgtgaaggctacaacatgcgccacatctttggttcttcaactattaaggatgctcactacaataatcctcgtgcttggtatattcacaactatttcgatccagactttggtggtactccagcagatcaagatcaaccttttatctgccatgctaatcgtttaatctcaattgaagatattaaatgggccgaaagctcacactaccaagacactccttacgatgcttatggcgatcaaggtactcctgaacaaaagaagaccttccgtcctatcggtattaacagaaactttgaaacccatattttgcaaattcgtaatgatgttcctgcagaaattgcaggtgtacaatggttagcctttggtcctaacacctttaactcaatggtgccattctatactaatatcactactacccctgaagcttggcaaaccactcctaagtttaacttgagcaagattttctggcttaacaagttaactgctcaattaggcgataccaactaccgtgtttacggtgaacttgaagacgcctttgaacaaaagagtttagcacaatgtcacaagatccaacatgatactgacaaagaagcaaagaacctttcaggtaaggaattacaagacaagttaattgctgctaatcaaaagatgtctgatacagtttataacaacactgttgaactgcttggtcaaatggttgacgaaggtcatggtttaatgactttgaaatacgacttgcttgattaataaataaagcaaaaaaataatccacatggaattcacatcccatgtggtttttcattaccttaaattcaactcgtaagctattctacttgaatcaaccggatcttcagttacttgaataatccctcgttcaataaaattatgactaactgcaatgtgctggacaattttatttttccggcttgtatcaattctaaaattgtgaattccttgtgcataagttagagaaataatattgctcaagaaaaattgactcaaatgcattcctctaaacttactagaaactgcaatgcggtgaattgtcgcataggtgtccacattattttcccacttgccttcaatatccgcataagttggctcacggccaattaccactgccgcataacctgcaacttcattatccacagttaatacccaagcacacccatttttaatatcatcttctacagttgctcgattagggtagccactttgccactgcgatgagccactttcctttaaaaaagaagtcgcatcatttaaaatttgcacaattttatccacatctgaattttgtgcacgtcttgtaaaaattaaactcatttgttcacctacaaatcgacatatcattacaaaaaccacacggagattttccatgtggtttttatttactaaatattatctaaaatacccggtacagcaggatcatccttgatagttacatcagctccaagttgacgcagcttttcttggacccgatcataaccacgcaagatattaccagccttgtcgatcgttgttgtaccatcagccatcaggcctgcaatcatcagacaggcacctgctcgaatctcacctgcagttacttccgcaccatgaaactgcttagttggatgggccaaaataatattatcttcaactttaatattggctcccatcttttgcaactgagcaatatgaccaatccgtttaggataaatattatcgattactacaccttcaccgcttttagcagttaataaaagtggtgtaattggttgctgtaaatctgtcgcaaaaccaggataaacatctgtcttcacctggaccatttttaggtcgcccgctgggtaaacatacaaagaatcttcatctgaatcgattactacacccatttcttcaactttagccaggtatgaatcaaggtgttcttcgataatattatgaatgcgaatgccattaccaatacaggcagctaaagcaacataagtccctgcttcaattctgtctggaataatcgtatgaggaatctgtgctttaagctgctccaccccttcaattcgaatagagtcagtaccagcaccacgaataactgcccccatattgttcaagaaggtagctaaatcaataatttccggttcttttgcggcattttcgattatagtctggccctgtgccgtcacactagccataataatattcatcgttgccccaactgatggcatctttaaatggatttttgctccatgcaaaccatcttctggtgcagtaattataatttgatcattttcattttttacgctagcgcctaaggcttcaaagcccttaatatgttggtcaatcggacgtggcccaatatcgtcaccaccagggaagcccactactgccttgccaaagcgaccaagtagcgcacccataaagtaatatgaagcgcgcaaactcttaatcttaccagctggcaacggactcatcttgatatcagttggatctattcttaaagtggtttcaccgaaatcacaatgtacatccatctcactcaataagtccatcaagttaactacatcagctattcttgggacgccttccaaggtcactggtgttcttgataaaattgatgccggaataagagcaactgttgagttcttagctccaccgatccaaacatcaccctgcaggggctttccaccatgaattatcatctgcttcattggcgaaaacaaatccttttctactttcaattaatcataataatgttaaaggatatttacaaaaaaaacaagagctgaggtctctcagttcttgttttcttaagattttgtataatcaaactttaatcactttaaaattcttgtgctggaagaccactagcagcgccaataaatgacttaaataagccttctggacgttgtggacgactcaaaaattctgggtgatattgtgctgcaataaagaattttttctttggtaattcgataatttcaactaagcggttatctggtgaaacgcctgagaagaccataccagccttttcaaaggcttcacggtattcattattgaattcaaaacggtgacggtgacgttcttgaataacatcttgatcatcgtaagccgcacgagtcttagttcccttcttaagagtagctgggtaaatacctaaccgcaaagtaccaccaatattttcttcatcacgcttatcagccataatgtcgataatattattcttgcagtttggctctgcttctgcagaattagcatcctcaaggtttaatacatcgcgtgcaaattcaacactagccatctgcatccccaaacaaatacctaagaatgggatgtcatgttcacgagcatacttaattgcagtaatcattccttcaagaccacgagtaccaaaaccaccagggacaatcaaaccatctgaatccttcatgatttctgcaatattatcttcagttacgtcttcagcttgtaccttatcaacatcaatcttagtgttgtaaagataaccagcatgttgcaaagcatcagtaactgaaatataagcgtcttcaagctctacatacttaccaaccaaggtaatcttagtgtgatgcttcaaggtcttagcacgttcatcaagcttcttccaagcttccatgtcagcttctggctttggactctctaagtgtaagaaatcacagactttttgatccatgccttgcttttggaagttcaaaggcacatcgaataatgaaggagcatcaattgattcaataattcgatcaacaggcacgtctgtaaaagtagaaatcttgtctttgtgttcttggtcaattggttgttcagcacgaagtaccagcatatttggttgaataccaatactacgcaattccgcaactgagtgttgtgttggcttagtcttcatttcatgagcagcgtgaagaagtggaaccaaagtacagtgaatgtacattacattttctggaccaacttcacggcgcatttgacgaatagcttccatgaatggagttgattcgatatcaccaacagtaccaccaatttcagaaataattacatctgaatcagtagtcaaagctgcacgcatgatcttctttttgatcatgtcagtaatatgaggaattacttgtacagtagcaccatggtagtcaccacgacgttctttttccaaaacttcttggtaaatcttaccagtagttacgttagaatacttgctagttctaacatctacgattctttcatagtgacctaagtcaaggtcagcttctgtaccatcgtcggtaacataaacttcaccgtgttggtatggattcattgtacctgggtcaatattaatatatgggtcaaacttttgcatagtgaccttcaagccacgattcttaagaagtcgacctaaacttgatgcagtaatccctttaccaagtgaagatacgacaccgccagttacgaagatgtattttgtcatgttctgctccttttaacttatcctttaaacaaaaaagctcccactaacggggagctaaacgcacatagggtgcccaacaaaaatattatctgctttttcttcttaagtcaagcaaattaattatcttcttcgtcatcatcatcatcatcatttaattgtgacaattgaccttcaatgccatctggcaatacatcatcagtatcatcgtctgtggcgtctaagtcgtcatcttctggatcatcgttatcgtagtcgataatgtcatcatcaccagtagcgctagctaagaaggcattaaccttcttgtggtgcttacgtgaatcgtcttcttcatcctcagggtgattaacttcttcatcaactgattcatatgggaaccatgaacgaagtgcccaaacattttcacccattgagataaattcaccatcagtgttcatattagtataaaattgtggtaaacgttcacgaatttcttcgtcactcttattcaagtatttttgtacggcattaacaatatcggcaaatgccattctcttgccattgtcttccaaaattgcacgagcaacttcgatcattgacaattcatcgcgatttttgtctttaaatttgtctaatcccacagctgtacgtcctctcttatacaatctttactattctactaggcctttaagtaaaaatcaacgtgactgcatagttacctattaagtatagtccattaaagaggtcatattcaacccgaagtttacgtgaaccatcatcttgactctgatattcaagcaagttagtcacgctggtcatgtccatgcggcgcccttcaactacatagcggcagttgcctttttcacccggaataaatttcattaaagaataattattgctgtcaacgccgcggcgaatcaacaattcattctcctttagaagcatcttcactggaatttgcccttcttcggcataagaaattcgtgtgacgtcgccttcttcagtcaattgcccttgcgcatgtcgcgtaaaagtctctgtctcatcgtcttgagtaattttactagtcaaatcaatcgtaattgctgtcaaacaagcgccccctttaaacattattactatatctctgatataattttagttagatataatctattttattatatatagttcaaaaaattaataaattaaacttggtggatttttatgacaagatttcaaagcgaaaaattaaaacaagaggttgttctccgtgatccggttcacggctatattcatattgaagataaagttgttttggacatactgaagtctaaagaatttcaacgcatgcgtcgcattaaacagttaggtcctgttagctatgtttttccaggtgcaactcacactagatttgagcacaacttaggcgtttatgaattaacgagaagaatttgcgatatctttagcaaaaaatatccctcaattacgccaggagacggtctctggaacgatgataatcgattactggtagaatgtgccggattgcttcatgacatcggtcacgggccctattcgcacacattcgagcacctttttggcaccaatcatgaaaaaattggacaaaagatcattactgatcctaatacagaaattaaccatgcattaaaacaagttgcacctaactttcctgaattagtcgccagcgtaatcgctaagacttatcctaatccgcaagtggttaaaatgatctcaagtcaagctgacgctgaccggatggattatttgcagcgggatgcttatttcaccggagttaactatggtaggttcgatttatcaagaattttacgggtaatccgtccttatcaaaatggtatttgttttgccaacaatgggatgcatgccgttgaagactatatcgtgtcacgctatcagatgtaccaacaggtctacttccaccgcgtaggacgctcaatggaagtcatcttgcatcaccttttagagcgcgctcaaactgtttataaaaagggaaatctgcaagttacacctagcttgactaaattccttgaaggcaattggactttagacgattatttaaagcttgatgatggagtaatggaaactaatttttctatgtggacccaggcacaagatccaatcttatctgacctagccaagcgttacttgtacagaaaaccgctagctagtgtccgaatcgatgaagaaaccaaaaatcttttacctaagctcaagagcctaatcaagcaagctggctttaatcctgattactataccgctaccaattccgcattcgatgaaccatatgatgcttataagccaacggggaaaaatgctaatagtcaaattgaaattatgcaagacgacggcagcatgattgagttatcccaactcagcccattggttcgcgcattaaatggtactttccaaggagatgaacgcttcttcttccctaaaactatgctcagtcacgatgaagatcagccgcaaattttcgatccactttatgagcaatttcaaaaatatattaagaatggtgccttaagatatttgagaagaccaaaacgtgagcaaaagaagtaaaattaaggtaaatcctagaatcgaggtatttatgatgaacagaaatgatttaaatacagatgtaagaactcaaattaatccagaagatgaagtaaaggcagaacctaagagtggctatactcaagttaaagacttgatggacacagttcatggttattgcatggactatactaaaatgtcttttgacttcattcatgaaaataaggatttggtaaaagacgtagtcaagattggttgtaaaaccgccatggtagcttgcgttgctggtgccagcattgcgattgccaagattgtttctggcaaagattaaattattatttagctcatgtaaaaaagggatgcgacgcatcccctttttgtgttgcaatatttacctaacttcttcgtcatttaattccaacagtaatgcataaagtgcaccatataagttagaatcattgccatgcttagcagccacaatcaccggcttaatcacttgattattcaacattggattattctgcaaaattttatcaaattgattgttaatttcttcaatcaaaattggctgtgcactaatcccgccaccaataattactttagagccattgattactgcctgaatattgaggatcatgattgctacattgcggcaatagcgtttaaaaacggctagtgctcttaaatcgccattgttaattgcctcaaacgcggtcaagccgttatcaagatcgatattccccaaagccaggttaacttttttgatcatattaaccgcagaacaactaaagccagcataagcagccatattcctagtaccaatacttgaattcgtaatcatccaactcaattcgccagcttgaaaagtccagccatgtaaaatacgattatcaactatgacaccgccgccaacagcagtgcctaaggtaattgcgataccagtattgacgtcatgcaattcgcctagccattgctctgacaaagcagctgctttaccatcattttctacgccaactggtacatcatattttttacctaaagtctcttctaaattcaagccatctaagaatggcaaggctccaccaaaatagataattttattcttagtatcaatcttaccaggagcacagactgcaatgccagcgaactttccttgatacttgtcagcgacttcatacatcgtctgcatgaatgcatctaggttttcagtattagtctttacccggtctttttcaagaatatgcccttcttgatcaattaatgcatatttcaagttagtcccgccaatatcgaatgataaatattgtgtcataattttgtcctctttaaatgaaaaacatctatctctaattatagatgtttctcatgtgtattttaatacactcttatttattataaatggtgatgattttttcaaaaaaaaataaaatgactaacccccggatttaaaattgaagtgcaacactaagtgttaaacaaaaaggccatgaagacctaaacttgaagtgacgaaaaatcaagaaaggaagatctttatgaccaattcaaattctagcatttctaagcactatcatcaattaaccagcgtacaacgtggacaaattcaagcaatgctggattccggcataacttcccgtactgttatcgctcaagaagtcggctgccataagtcgacaatcagtcgcgaaatcaaacgcggaagtgtcctgcaaagagacagcagctatttattgtatgagcactattacgctgatactgcacagatttattatgagaagcgtcgcaaaaactgctatcagcgcaatccattgaagcattatgctgtctttttgagaatgctctccagacgctttaaagctaaatttgatgccaccagcatcgatgaattcgttggtgaattcaaaaggactatgccaggctacccttgtcccagcacaccaactgtctatcgctatattgatcagggcttgctggacataagcaatattgatctgcctatgaagctcaaaagacgcaggaacaagcgtcatcacggccatagcggtcatgctttgcacaagaagcatcttggcaattccattgaacagcgtcctaaagagattgaagacagaaaaacgccgctgcactgggaaggagatctggttaaaggcgtcagacgcaagaatcagcctgctttaatgactttgaccgaaagaaccacacgctttgaagtagttatcaagattcctgactatcgggcaagcacatgccaaaggctgcttcaaaatgagattgacagacatcctgcctggtttaaatcgatcacgtttgacaatggctctgagtttgcggatatgaccaagatcaaaggctgccagatctacttcgcccacccatattctccatgggaaagaggcaccaatgagaactgcaatggacttctgcgtcaattcttccctaaaggcaaaagcatgaaagataagtcagctgcttatgttcaacaggcaactgatgccattaaccgcaaacatcgtcgaatccttcaatatcacacagcagaagaactcttcaagcaatatatttcctcatagcctaactgttgcacttaatttgacaattcaggaaaatgactaacctcatcggctagccattttttattatcaaattttatcttacttgttcttgtcagcttcgtatctggtgttgaacaatgggctaagtgcttcatggttttggatacacttaatagcatcgcccatcaatggaccaactgataccaaaagcatcttgtcaagcttcttctctgctggttgattgattgaatcagtcaaaaccaaattcttgattggtgaatcgttcaatctcttaatagctggaccagatagaacagcatgagttgcactagcataaacttcagtagcacctgcatcaattaaggcttgagcagctaaagtaatagtaccagcagtatcaatcatgtcatcaatgatgatagcacgcttacccttaacgttaccgataatgttcataacttcagcaacattagccttgggacgacgcttatcaacgatggcaattgggcaacctaagaattcagcaagctttctagcacgagtaacaccaccgtggtctggtgaaactacaacagcgtctttctctaagccgttacgcaagaagtagtctgccaaaagtggagcacccattaagttatcaactggaatatcaaagaaaccttgaatttgtggtgcatgtaagtcaagtgaaagaatgcgatcagcacctgcagcttgaagcatgtctgcaaccaatttagcagtaattggttcacgagcacgagtcttacgatcttgacgagcataaccgtagtaaggcataacaatgttaattgtacgagcacttgcacgacgtacagcgtcaatcataatcaacaattccattaaattgtcattaactggcttactggttgattgtacaaggtagacatctttaccacgcacagtttcatcaatattaatttgaatttcgccatcactgaaacgttcaacactagacttggaaagtggaacacccacacgatccgcaatcttttgtgctaatggtacatttgagttaagggcgaagatcatcatatcgtctttataggacataatttcctccgtaaaaatatttaaccagctctattttagcaaaagttgctctaaaaagaaccacattctccttaattatagcaagaattttgccgcaaccataaaaaagcactaactattaatcgctaaaaaagttagaatatatttgtactttctagtacaacgaaaatatcctaaaaaataagacgtagtgtcctttcagatactacgtcttattttatgcatttctagttagttgaagttgctgaagtttgagtaacataatcactaaggtttaaaacttgagtataaccattagtaacaattgtcaaagcaccactatttgaaagttgaattgaactttctggtacattattagcagttgcaaccaattgtacaattgaagttacttctgctggagtcaaattactaatgcttgatacagtgattttcttaccgttaagtttagccttagcgctaacaattgcagcatctgcttcgttaacttgagcaatagtagctgtagcatcgttgttaacagcagtaccatttgtaattgccctatcatatgcagccttggcatcacttgaagcaaacttgtaagcttctgagttcttaacactagttgcttcgttaatgtcttgaagcaacttagtcttatcagctgctgtagcaactgtaacgtctgctctagcttgttctggagtgttaacaggagttaaaatcttaccacttacagcaacgtctgactgctttaaatagcctctaccgcttgataatttatagaataattctggggtagcagttgcagaagttgcaatatatctcaattctgaaacttgttgactttgaccttcgccaaatgctctaacgttatctggttgtcccttaatgttgtaaagtggagcaacattaatcgtagttaccttggttacgtttggatctacagtattatcaccagtatcaacagtagcagcaccatctggttcgttaactggttctagttctgggcctgaaattttacctacattagcagccttaacgaattgattatcaccaatcttgtagtaaagcttagtaccaatgtatcttgcttcagtagctttaacagtcttacccttcttaactgtcttcttcttggtgtcaccgttaccattgtagatataagcattcttcttcatggtaattgaagttgccttaacggttctagttacattacttgccttaacaaaagcagtgcctttcttgtcaagttggtagtaatccttacccttaatggtttcaatgccataaacatcaattgcggcaccctttaaaagcttagacttgccttggtacttgttgatgcgcttaccattcttatcataaatataagcattcttctttaatgagtagtcatattttttagttgattctgcatcatttgaaacagatgattcttggtttgaagtggttttaccatcaatgttaacagttcgtacaaaagcagtacccttcttgtcaagttggtaatacttcttaccgttaatggtttgaataccgtaagtagtgactgaatcacccttaacaaacttagatttgccttggtacttgctgatacgtttaccgttcttgtcataaatgtatgagttagaaacaaacttagccttagtaccctttgacagtgatgaagttgatgacgcagctttaccatctacgttaacagccttgatataagcaccaccaccaagatcgtagtactttacaccattgatagtcttagtgccagttgaagtaacagttacgcctttagcaatagtagtgttttttgcactgcccatgtacttatcaagacgcttaccattcttatcgtacacataagcattacgtaccaaagtgatcttgttgtttgctgccttctttgaagtagtcttcttaggagcagcttgaacagtgttgacgttttctgcagtacccaaaagtggagcaacactcatcaatgcagctgctgagaccataactaatttatgacttaatttcatcgataaatacctcattcttactaaacttaaagttcatttatatattgtagatctaaaatatttttttgccaatttagaaacgaaaaagtgtctttttcctatcaattattacttaacagttacatctgaagctttaatgtaataatgatttggttgcaaagcataatatttaacaccattaatggtcttagtacctaaacctttaacagtgatctttttaccaatgtaactagtgcctaaatagttttttacacgcttaccattcttgtcgtaaacgtaagccttattcttagtagttatcttaactgccttagccactggcgtcttctttgatgaagttttcttagtagtcttttctgagttgctttttttagtagtcttagtggcagtttttttagttgattctttaactacttttttagtgtttttatttgaattagtcttcttaacagccttcttagttgaagtagaagttgttaccttcttgccatcactctttaaagtataagtagtattgcctgacttataagttactgtaccttcagttgcagttgcaggaatccagtacttcaaatcagtttgaatactgtagtaaacttgaccgtcgatattcttgacgttccaaatagtgtagctaccacccttaggagcagtcttagaagttttcttaccattacggtcgacaaacttcatagtcttagttactttgactttgctgtttttaccgtaagtattatgtacgccattagtactcttagtagcagcttgaacagatacagtattttctgccatgcctaatactgggctaacacccatcaaaacagctgctgaaaccataactaacttatgacttaatttcattgtattacctacctcatgtaaaaattattattagtacaccttattgtaggtctcaattattattttgcaataagtatttagcaattcttaacaaaaaagcactagcttgatacactagtgccttattcttaatcccattctttatcttgagaaagaggaagcttatgccaataatctggcttattaacttgacggccacggccaattgccatgtcatatttattaacgtccttagtaacagtggtatcagctgcaataaaggcgtgatctgcaacattaattggagcaatcaatgttgagccagcaccaataaaggcatgatcaccaacattagtatggaacttctttacaccatcgtaattagagaagatcgtaccacagccaatgttaatgtctttacctaaggtagcgtctccaacataagtcaagtgacctactttagtattttcaccaatctcagccttcttaatttccacaaagttaccaatatgtgcacctttgcgaataattgccttaggacgaaggtgtgaattaggaccgatgtcagtattatcgtccatttcagcttcttcaacagttgaagaagtaacagtgacattattaccaatcttagaatcaacgattcttgaaccactagtaatgtagcaatcactaccaatttcggtgtttcctttaatcacaacattaccttcaattacagtgtcgttgccaatcttaacatctgcatcaatataagcagtatcagggtcgataaatgaaacaccatcacgcatatgctgttcattaattcttctttgcatagtcttagtagcttgagctaatgcaatacggtcattaacgccaaggctttcactaaagtcaggcatcttgtaagcaccaacgcgttcaccactattgcgcaagatttctaaaacatcagttaagtaatattcaccttgagcattgtcattattaacgtgcttcaatgcttcaaataattttttattgtcaaagcaaaatacaccagtattgatttcttttacttttaattcttctggtttaccatctttttgttctacaattcgtaaaacattgccttgatcatcacgaataattcgaccatagccaaatggatttggagcttccgcggtcaatacagttgcagcattgcctttttctgcatgatacttgaatagttcattaaatgtatcagttgtgaaaagtggtgtatcaccagtaactactaaagtagcaccatctttgtcacccaattcttcacgcgcagtcattacggcgtcaccagtacctaattgcttttcttggaaagcaaacttagacttgtctgccagtactttttctacatcgccagcacctgtaccaacgattgtaacgatttctgcaggattaacgccttgagctgcatcaacaacatgctcaaccatggttttaccacaaactttgtgtaaaaccttgtacaactttgacttcattcgtgtgcccttacctgcggcaagaacaactacatatttttccattaatattaacctcttaataatcaaaacttgattctagtataccattttagaaacggtcaaaatcagtttcagttaagaagttaccaggttctgctacaatcagcttttgggcagtatcaatttcactaatttttactaatgaaagatagttcttaatcagcttttctttgtcaaaatcggcttcacagagtacacaaacgccggcaatagtaccatcgaattccttaactaattcttccattccggttagggtaccgccacccttcataaaatcatcgacaattaaaactttagcttcttttttaagagcacgagtcggtaattccatcttcgatactcgagacaacgatgaagaaatatagttaacagaaatagtagcaccttctgttacctttgatcgctttctagctgtaacaaatggtacatctaaaaaacgagcaactgctttggctaaagcaatcccttttgtttcaactgtcatgacagcatcgatttcttcataagcataatgagtagctactaattcaccaattttacgtaaatcttgcgtattgcctaaaatatctgacagatacacaaaaccaccggctaaaattctacttggatcctcaatcctagttgataaatctgacaaatatgcttccgcgtgttttttacctaaaaatggaatatagcgcacgccaccagctgcaccggctacagtctccaaaataccatcttgattgctggcaagagtgtgcttcaaaatagctaaatcttctgaaatagatgacttagcagcgccgtaacgcttagcaaagaatggtagtgcaattaaagtatggggacgctccattaaatatttggtcatgtccaccaatctttctgaacgtttcatgaaatctcctttctaatgtttggtttatacttaattaatatactctaaagggcaaaaaaaagcactaacattttaaataaatgctagtgacaatttcaaaaattgtgtttaagcttcagcctcttcagcttcatcatcaaactctaatgcaatattcttagttagtaaatcggtataactgtaagaaacatgtttaaaattattttgatgttggtctaaatcaaccacaaacactgcagggaaagtctctcttagaattccccgtctcttagtaactttcttacgacccgcttgagctactactgttaaagtatcacctaagtgagaatccaacttatgtttaattgtgataattgatgttggcactaaacaacagctcctttagcaacattttatcacaaatatataataaattcaatattatacatcatcttgcaggaataaagctagcaattttaataaattgtttaattgttaattcttcagggcgaattcttggatttacccctaattccgcaaataattcatcacgcttagttttatcaggcaacaaagcttttaaattattattgagtgtctttcttctttgtgaaaaacacattttcactacccaaataaaatgcttacgattttcaattgctggcttttccttcagtggcgttaagacaactacgctcgagtctacttttggtcgcggcataaaggaattatgactcacctgcaaagcaagtttaacattcatttcggtctgaacggaaatagtcaacggaccgtattccttgctgcctggttgggcttctaatcgttctgctacttctttttgcatcattaaggtcaatgaagtaaagtgcaaatctgattcagctaaggcaaaaatgattggcgtagtgatgtaatacggcaagttagctacaactttaattggcttagtaaaatcaaagaagtcactaatatctaccttaaagtccgcttttaatagatctttcaagatcagcttaaagcgactagccaaaggctgatcatcaattttcttaggcagttcattctgtaaaatcgtaggtaagctatcatcaacttcataagcaaaaactttagcacctgccaacagtagttgctcagtcaaagagccaatacctggtccaatttcaatgacttgatcatctttttttatcccagcagcttcaacaatacctaaaatagcagtctgatcaactaagaaattttgccctaagttctttttagctttgacaaagtaacggttaacaattgcttgtgttctaactggagagccaattggaatattatttgtcattttctacctccttgacagctgcctttaattcagctaatgaaacgccaaaagtatgcaagcgattataaaactgcttggaattgccatagccaactcgtaatttaatgcctacttgttcacgtaattttcgtgagccgctaccaccagctaaacctaattgccgataaattgctggagttaaatcacttttttgcggttcaacctcatgcaaatcacttagtgcatgctcaagtgcttcttttgaagcatgttctacacctagactcccctttttatgaggttcgccttccttacgggtaataaaagcttgctttgcatcaggaacagctttagttacaatgcgccggattctttcgccattaaagtcaggatcagtaaagacaataatttgccgactctcacttaatttttggatttgcttcaatacttcatctgaaacggctgatccattagtctcaattgtctcgattcctgggaaaaattgttttaaacggatggtatcgtctttcccctcaacaacgattaccgcatcaaaattctttttatttaagcccataaactctcactgtgttcttataagtagcatccgccactttctctagtggaatatccttcaacttagcaattgcttctgccacataacgtacgtagccagtttcattttgatgaccacgatatggcttaggcgttaaatatggcgcgtcggtttcaactaaaattcggtcaagtggcgcagcttttgcactctcgtgtacttccgtagccttagtgaaagaaacaacacctgaatatgaaaagtaaacattcaaatccaaaaacttatttaaccagtcaacaccaccgttaaaactatgcaaaacagcaccatattccagattgctatttttcaagatgttataacaatctccaaatgcatccctagtatggatatcaactggcatcttcaagtcatgtgctacttcaatttgccgcgcaaaaacattacgctgtacgtcgcgcggcgattcatcccaataataatctagcccgatttcgcccattgcaactaccttaggctgcttcaattgttcaattagtttatcttcagcctgttgatcatagtctttagccacatcgggacagtaaccgaccatcgcatagacattatcaaacctttgtgctaagtcaaccgctctttgattaaagtcaggatcttgccccgcacaaataaccttggttacatcaagtgcttttgctcgttctaaataatattgttccttgccgcgaaacggctcgtcattcaaatgagtatgattatcaatgatctccattagccgagttcagccccaactgcatgttcatcaccaacaagagctaacttaattttgccatgcttttcacttgataagagcatcccttcactaaggtgacccagcatcttacgtggctttaagttagtaacagctaaaacctttttgtctaatagctcacttgcatctggataaaacttgcggataccactcaaaatttgggtttccttgccattaccaaagtccagcttgaacatgagcaacttgcttgagcctttaactggttcaactgacaaaatttggcctacttggatcttaaccttgtcaaaatcgtcaatggtgatttcgtcacccttcttttgttcacttctagtggtcttctttggcttagctttagccatttcatccttgatgtacttaacttcttcgtccatcttaagtcttgggaaaattggttgtggtttttcaattactttaacatcccaatcaaagtcaccaaaggccaaatgcttagcgtcttcattgtcccaatttaaaccaagttgcttgaacataattggtgcagtttcggtcattactggttcaatcataatagcaattaaacgcaagctttcagccaaattgctcatgaccttgctaagttcttcctttttaccttctttgttcaaagcccatggagtagtttcatcaatatacttgttagcacgagaaaccaacttccaaatattgtctaatgcctttgaaaagtgaagtgaatccatattttcgcgataatcattaatgacactagcagctgtatcttgcaagtctttgccaaattcagcttgagcaacgggaactgcatcaacatgaccagcttgatattgattaatcattgacacggttctgttaagtaagttacccaaatcgttggccaagtcataattaattctttcaacaaagtcttctggtgtaaaaataccgtcatcgccaaatggaagagcacgcatcaagtaatagcgaagtggatcaacaccataacgactagtcaatgattctggataaacggcatttccctttgacttagacatcttgccatttttcatcaatacccaaccatggccgataatgtgcttaggaagtggcaaatcaagagccattaacataattggccaataaatagtgtggaaacgaacaatttccttacctaccaagtgaacgtctgcaggccaatatttcttaaacaatgaatcatcgtctgaaccatagcccaaagcggtaatatagtttgaaagtgcatcgatccaaacgtaaaccacgtgtttaggatcacttagaacaggaattccccagttaacagtagtccgggtaactgataaatcttccaaacctggcttaatgaagttattaagcatttccttttcacgtgaatgaggcaaaataaattcaggatgttccttgtagtattccaccaaacggtcagcatacttgctcatcttgaagaagtaggatggttccttaaccaaacgtacttcatgaccacttggagccttaccgccgattacattaccatcatcatctttgtaaacttcagcaagctgtgattcagtaaagtattcttcatcttcaactgagtaccagccagtatattcgcctaggtagatgtcaccttttgctaataatttttcaaaaatcttttgtacggcagctacgtgctctttgtcagttgttctaataaacttatcgtaagaaatattgagactcttccataatttcttgtaagaagccgccatcttgtcgacgaactcttgtggcttaattccttgtgcttcagctttttgttcaatctttaagccgtgttcatcagtaccagttaaaaagaaagtatcgtagccttgactgcgcttgtaacgagccattgtatcagctgcaatagtagtataagcattaccgatcgttaagcgaccagatggatagtaaattggggttgtaatataaaaagtatctttatcagccattgattaatcaaactcctttaatcgtctaaaatatctattttattttaacatgcaaaaaaaggaattgggctaaaaccagcaattccttttaattcaaatcagaatttttctttttttaaatataagtgcttaaccaaagtcgtcagtaaaatgtagattacttctagcaagaagactatgccccaataaccaaacggcaattgagctaggcccaaacttggcgcgatacttgatgaaggcaacattgtaccaataattgccataccaatggtcaccaagaacaccactggcgtggcatgttgcttaaagaatggaaaacgttcatcacgcaaagtgtgaatcaccataattcttgtccaaagcgattccacaaaaatccccgaataaaatagtgtcataaagacccaatgatgataattagaccctactaaatatggacaaatcacataaaacatcaagcccattgcgataaaatcaataattgctagaatcggaccaaaattaagtacaaacttcggccatctcttaatcgaccatttttgtggctttttgacatagtttttagaaacactatcaaagggaataaccagacaacttatgctaaacagcaaatttaaaattaaaacttgcaatggcaaaagaggcaaaaatggcaagagcagcgatgaaacaaccatcgcaattacactaccagcgttagttaccaagaaggtcttaatatatttcattgtatttgaaaagacttttcggcccattagaatcatttcttctaacagctgcaaatctttttgctcaaaaataatatcggctgactctttgataatatcaactgacgtattcgaagttacggtcacatcagctaccttcattgctaaagcgtctttattgccattccccatataaccgactgtatgaccgtttgctttgagtgcattaataatttttactcttaattccggggttattcgcacaaatatatcgcatttttcaacaatttcacgcaactcttccgggctaaccgcttcgatctgggtgccgtcataaacagtatcaacgtttaatcccacctgcaaagcaatagcacgagtaactgcttcgttatcaccagtaaaaatcttgacatcaacataatcttttttaagatcttccagcgcttctttagttgtttcttttggcggatcaagataagccaaatagccaataatggttaaatcatgttcatctttagcagagaactcacctactggggcaggatttaatttataacctactaaaagtacccgtaaaccgtcatcgtttaattcattaatctgatttaagatcttttctcgccaggcagtagttaaatcctcaacctttccattaagttcaaccttattagaaattgccagcatcccttcagcggcacctttagttactaataagtgctgcccgtggtgttcatcgttatctaccactaccacgctcattctttttcgagtgtagtcaaagggaatttcgtcaattttattgtaatcacgctgaatttcgtttacatctagttcatcgcccgcggcatcaattaccgccttatcgattaaatcttttaccccagtttgataatatgcattcaaatatgaaaacttcaaaatctgtggggtttcttgcatatctaaatcatagtgacgctctaaaaccacttgattttgtgtcaaagtcccggttttatcgatacagaacacatcagttgagcccaaattttgaatagcattcatttgcttaacgacagcaccattttgggatatttcccgtgcgccccgtgttaaattggaattaacaataatcggcaacacttctggtgttaagccaactgccgctgtcaaagcgaaaattaagctttccccccccaattccccttagtcaggccattaatcacaaacaaaagcggaatcacaattgctgtcgcgataatcaatattttagctaattgcttcatttcccggtcaaacagggtagtttttacttttttacgggaaatagcctgaactgctttgccaaaaacagtgtgattgccaattgcaaaaacaatcccggtgccagagcctgaaacaatagttgttccctcatatagaatattagggtagttcaaataatcattagccatactcggcttaattactacattagccatcttttctgccggctcaggatccccatctaaatagcttgatgagcaaaaaagatctttgctagttaacaacttcatatccgctggaatcatatcaccagccgacaagttaattacatcaccaaccactacttcatctgttggcaattccacatttttgccatcacgccggatattcgttgtaactgataccatattgagtaattgatcagttaccttagcaattctgattttttggataaaattgacgagaaccgagataatcaacatcacgatcatcactatcgtagtaattaagtcattatctccttgtggcaccaaaatatagctagtaaacagggttaataaagttaatactaataaaaccaacgtaaatggcgtagcgattgattcccataataagcgccatttagaggaattgctattagtaatgatttcgtttttgccatattctcttctgttttcttcagccttattagtcgaaagcccttcagcactcgcctgtaaacgcgccagcgtctcgctacgtgactcacgcgcaatccgttgaatcctttgaatgtctatattcgatcgcttcttgctagctgcttttaacattatttgctcccttctttaattgggacaagcaaaacaaaaaagccacctgtaactctgcaggtgacttttgccaaacaaggctctgtcatactcgtcgttcagttttaacactacgtgacgtaagcacatgctagctatctggatctcgccttaagtcgacgacacctatttaacccgttggcatctctggatgtttctgggcgatagcgtgtgttcacgtaggagtctcacctaacagtttttcgctaattatgtctataaaaagtgtaaggacaaaatgcaaataagtcaagccgactatttcttagaaattggatcacgatgactaaatctacgcaagaaataagtaattcccgtaattaaaaatgccagtgccagtgcgattggtaaagctacactatgtggacgcgcgactttattttgttctgcttgcgtcaaatcatatttatcaagtgcatattgatattgttgatcaactctagtcgcacatgcccgaaagacgaagcgaattcccttgttaaaagttgcattattttgactacgcaatttatctacttcagcacgcaagatattgccccgagcgacctcggtgaaggcactatgcaaatctttagttgaataaatttgcacattacgctttttacctttctgtcctaccacaataaagaccgttcgcttagaatgatctagcatcttaggtgttaacttattcagccttttaaccgttataacgacaatttgcggttgttctttagtctgaaaatagcgattatttttttccgtaatcaaagtgcgagtttctttatctaaaatatgagcatgatcttcaatatttggctggacaaatcctgtcgttattaaaaatacagttactagtcccattaaccaaattaaattaattctcgtcttcttcaagtttatgggccaagctttccacgtatttgcgattaatcttaatctgttcataaggcaccccgctatcatgaagtagttgcatcgccaatggattatcgcgatagtcaaaataatagttaatttttttcacgcctgcctgcaacaaggatctgcagcaattatagcaaggaaaatgtgtcacataaatctcagtattttctgtagaaacaccaaacttagcacactgaatgatcgcattcatttctgaatgaatagttctaacgcagtgaccatcaaccatttgatgacccacatcgtcacaatgcggttgtcctgaaacggaaccattataaccagtgccaataatccgattattttttactaagacgctaccaactaatgcgcgattacaagtagagcgttgcgcaattactagcgcctgcatcataaaatattgtttccaaggaattcgatcgtgcataactttacctcagccttatctattcttgaaatagttcaaaccaattgcgtcacggacttgttcaagtgttgcattagccactttattagccttttttgaaccttccagaagcatttcataaaccgcatcttcatcttgagcaaacttttcgcgacgttcacgaattggtgcaagctctgcttcaaggaccttgtttaagtaacgcttaatcttaacgtcacctaagccacccttttggtattctgccttaagttctgccaccttgtccttatctggatcgaagacatcaagatatgtaaagacagtgttaccttcaaccttaccagggtcttcaacgtgaatatggttaggatccgtgtacattgacataactttcttttgaactgtctttgcatcatcagcaagataaatcgcattgccaagtgacttcgacatcttcgcattaccatcaagtcctggcaaacgtccttgacctttaggtgggaaataacctttaggttcaaccaaaacatcacaattataaacacggttaaaagtcctaacgatttcacgtgtttgttccaacattggttcctggtcatctccaacaggaataacggttgctttaaaagcggtgatatcagcagcttgagaaactggatagtttaaaaagccaattggaatagagtctttgaaatctttttgcttaatttctgtcttaacagttggatttctttcaagccgagccacagttactaaatccatgtagtaagcagtcaattcaaatagagcaggaatttgtgattgaacataaatagttgatttagctggatcaataccaacagctaagtaatctaaagctacttggatcaaactattgcgaattttttccggattacgagcattgtcggtcaaagcctgtgtatccgcaatcataatatatggatcatatttacctgaattttgtaattttactctattctttaatgaaccgatatagtgaccaatgtgcagcttaccagtaggacggtcaccagttaataaaatttctttcgccatctttttgctcttttctaatttttaagtttatttttttattaatattaattgtttaattacctaattttaacaaaaaataggctatgattaaactagccctaaagaaaggaaatgcgtatgtgcaaccagtttcgtttacctaatttaaaacaaattcaacaatatctcaaaagcgatcttgacctgcccttagttacaccaaattttgacattcaagcacaagatatttttcctaaccaagtagcacctgttttgctttatcaaaatggtcaattgcaattaaacaacaaaaaatggggctatccaagtcccgttgatccaaaaaagccattatttaacgctagaattgagcgattttatgattcagcgccttcaatgtgggacaaatcctttgccaagcaacgttgcttaatcttaaccgaaaaattctttgaatatgctaaaactacccatattgctgaaaacggtcgtaaataccatgatagctacgccttccgcactaatcaaccacttaccttaattgcaggtatttatgatcaggattatttttcaatggttactaccgcgcctaacaaagatatggcgccaatccataatagaatgcctctagttgttatgcccaacgaactacgccgctggctttttcaaaattttaccagcttaattgatcgtaaaagtgttgatcttcaaatagaaaaaatgctaaaataaaaacatattgcgggtatagttaaatggtagaacgacagcttcccaagctgtagatgcgggttcgattcacgctatccgctttttttatacaaaaataaggatgagaatttttctcatccttttgtttttaaatcataatcactgtaagtacgccactaactacagctaagtaaattggcatcaataatgtttgtgtgtacatatagctccaagcaaacaccatgccataaattgcatcaataataaacagtactactgaattttgaaagctcagtaagctataaatcagacctgaaacaatgatccccataattgcaacttgcttagtatttcgccgaaaagcataattgaacaaaaagccagtcgccaaaaattcttgtaggattggtaatacaattccttggacaacgattaaaaaccaaaacatgttaactgattcacttttggcatatatcaattggaaatcataatgactaatcctgccatatgattgtaagtatgaaatcgaaatctgtgtaactgtaatcactaatgttaatagaacaacagttgacaaactgcccaaccatggaagtttaaaatcacgggcaaaaaagcgttgctctcgattgaaacgataaacataaaacaacagaatcatggctgcaactaagccgaataaaatcaaatcccaaatatgaaccggagattttctagtaactagctttactactgcaaacacagcgacatagccagctaaataaacggcatagcggatcacattaccctctcttgattgtggcgtattcaaattcttcactcctactctgaattgtatcctacaaaacccatattataccagaaaaagacagtttattatagttctcaacttatttagtaagtgtcaatgtttttgcggtagcctttaaaccattagtctaaccttaatttcttaaatatttatatgacttaaatttctgcttagcttgcttaaataactattgccagctacctgtgcggttaatgcgccatgctggatgcctaaatgaacttcatgacgcttctttaagctgtcacgggccgctgcttttaattcctgttcagtcaatacagttatttctgaatcttcaaactcgctgctaagccaaaattccagctctcgattcttgatgcagcttaagatcctaagcatgccttctgctccagattttgaccatttcttgccttgccccttaacacggtaggtatacttgcggtggttgctctcgcagcagccaatggctttagtcacagtcagttttcgtttcttaaacggcttaatatcgtcccaatgacgatcaatataattccttaggcgccccagataatcatgattgagctcggtattcaattcatcaattagtcggctttctgcagtggttaggatagttttaactttgtcatagctgtatttgtattccaaagcagaaatcagcttgccttgcaggtcaggcgcaaaatatagcctttctttgattttcttatttaggtgaaagacatccaagaaatgctcatgacgcttgcatagccctacaatgtcatcgaagtctgttttggcatatccagcaccgccatcggcgttgctaagaattacagtatcagaaagatcataagtattggccaggtactccttggcttcgttcagcgcatcaagtcggcttaaagaaacaaattccttggcattgattcgctttctgcgtttcttgcttatattgacaatgccttcacagacctgatagcgatgaaattccaaccggcttttagtgcctttgatcaccacgccatcgccttcaagatacaaaactgggacctttttcttagtgcctgcggcatcatatcttgaatctgcttcttggcccgctttaatatttttcccggccatttttaccaaattgcccacctgcatatggctaatattaaagccagacaggcaattgactgctagagcagtattgcgataagtggcaacgctgcttacttctaagatgtttttgactgctaaaatactgtagcgcttgtatttgtaaaagcccattaattcatccaagggataccttgcttgtttgcctgggcagacatatcttcttctgacatacctaacttcgccaaaagccatattgattgagcgctcattcttcttatcaatctgatagccctgtgctttaaccttggtaatcatttcatcatcaactttagctaaagccaaggccatgatttccttaatcaggtttaagaagaaacagattatttttctttcacgcttaatataattatcttcagactttataatatttgcgatttcagttacaattgaattcataaaagaccagcttctaatgtgttttttgttcttaacatcagactactggtctttttgtttgagctcaagtccaaattcaaaggacttgggcttttttaattatttattcaacttaccgtaaaaaattatacacttagatactttaattgtttgcctaggtaacgcagacgactttgtaagtgacctagatcacgttttgcttcagtatattcagtattttccgaaagatcacctaaagctcgtgcagcctgcaaaattttaattctacgtggccgatctttttttaatcgagcaatttcatcctcaatttgttgatagccttctggtgtcattttctaaaaatataccatttctatttcacaaactttctttatttttctatacgtaataattatctacaatctcagaatgttattgtagcagcgttatcagtctaaaattagcactataaatttttgagtgctaatttgtgtcatttctataaaaagcgactacaataaacagtgtaaggagaaaagagatcaagaaatgagttgatcttttccttatattctaattaagcaaatacaaaaatgaaaggaagttttatttatggcaaacaatatgatgaatcggcgcaacgacatgatggatgcaatgaatgattggtttggttttccaagaaacttctttgacgataatgaaattgaaaacattatgcaatctgatgttgcagaaactgataaggactatctagttaagattgacatgcctggcatggataagcaggatatcaacgttaactataatgacggtacgttaaatgtcagcggcacaagaaaatcatttaaggacactagcgataaaaatagaaatatcattcataaggaaagaagtgagggcagtatttctagaagctatagattaccaaatgtagttgcaagtgagattcatgcaaagtatgataatggtgtattgaccatcactttgccaaaggaaactgctggcaatgatggcaattctatccaaattgattaatttattagatataggcaagaaatctaataagttgacggattaataattctctcaagcgagttctgattgaacccgcttttgttttgctttaaaatagaattaaattgagaaaaaaattataaaatgaaaaggagattttttatggctcatgaattaactgtgcaggaactagaaaagttctctgccgaatttaataaaaaacctgaaaataaagtcgttgctcgtgcagctcaacgcagtggtgtacttgaagcatcttataatgatcgtgttcaaggacaattaacccgcgtcttttcaactgaacttgatacaaataatgtcactaaccaaaaacattctggtcgttgctggctgtttgcgactttgaacgttttgcgccacacttttggtaagaaatataaggctaaggacttcaccttctcacaagcttacaacttcttctgggataagatcgaacgtgctaacatgttctacaacagaatcttagacagtgctgacatgccacttgattcacgtcaagttaaggctgacttagactttgctggtagtgatggtggacaattccaaatggctgccgctttagttgaaaaatatggtgttgttccttcatatgcaatgccagaaacttttaacaccaatgatacaactggttttgctactgctttgggcgataagttaaagaaggatgctttagtattgcgccacttgaagcaatacggcaaagatgatgaaattaaaaaggttcgcgaaaaatttttaagcgaagtttaccaaatgactgctatcgcagtaggtgaaccacctaagactttcgatcttgaatatcgtgatgacgacaagaaatatcatttagaaaagaacctaactccacttgagtttttacacaagtacatgggcgacgttgattttgatgactatgttgttttaaccaatgctccagaccatgactataacaagctttatggtctaccagctgaagacaacattgaaggctcactgagaatcaagcttttgaatgtaccaatggaatacttgtccagcgctgctatcgctcaattaaaagacggcgaagctgtttggtttggtaacgatgttttacgtcaaatggaccgtaaaactggttaccttgacactaatttgtacaagttagatgacttattcggcgttgaccttaaaatgtctaaagcagacagattaaagaccggcgtcggtcaagtgtcacatgccatgactttagttggtgttgatgaagacaacggcgaagttcgtcaatggaaagttgagaactcatggggcgataaatctggtgttaaaggcttctacgtcatgaataatgaatggtttaaggactatgtttacgaagttgtagtccacaagaagtacttaactgaaaaccaaaagaagctcgctgaaggtccaatcactgacctaccagcatgggattcattagcttaacgagcaatgatcatataaaaaggcgatccatatcggatcgcctttttagcataaatataatattaatatagagagagttacattagatttggtatctaattttcgtagcttgccgctacttcttcgtaatgcttgacttcatcgtcagagcagcgtacgaagtgtcctggacgaatttcatgcattgagcgttgctttccgtccatttcttctttttgagcgtcataaggaatccttgtccggctccgctcaacttctggatcaggaattggcactgcagaaatcaaactcttcgtgtaatcatgaagtggtcgatcatagacgtcatcggctggacctacttccagtagtttaccgtagtgcattacaccaattcggtcagaaataaacttaaccattgataaatcgtgggcaatgaacaagtaagttaaaccacgctttttctgtaattcaatcatcaagttaactacttgagcttgaattgatacgtctagagctgaaataggttcgtctgcaacaataaatttgggctctacggctaaggcgcgagcaatcccgattctttgacgctgaccacctgagaattcatgtggaaaacggctagcatgacttgcatttaagccaacagtttccaataattcctctactctctcagttcgttcatctttatttttaaccaaatggtgaatatctaatccttcagcaataatgtcctcaacagtcattctaggattaagtgaagcataaggatcttgaaagatcatttgtgcatcccgtgtaaaagctagtttgtctgcacgactttttaaatctgctacatttttgccttcaaaaatcacttcgccactagttggcttatacaattgcaaaattgagcgcccagtagttgtcttaccagaaccagattcacctaccaagccgaaagtttcaccttcatagatattaaagcttacatcgtcaacagccttggtgacattacgaccatttttaaagtattgttttagatgttttacttccaaaattttctttttttctggcataaaaatctcctttaccgcgactagttaacctctggcagtttatcttcttgtttcatcaagttatattttttccagcgacgtgtaatttcagctggtggttccactttaggtgcacctggtgctaaaagccaggttgcagcatagtgagtatcagttaccttgaaaaatggtggctttctttccacatcaatcttcatggcatacttatttcttggtgcaaaaggatcacccttgggcggatcaagcaagttaggaggcgtacctggaatcgactccaaagtatcactgtttaaagtaggcattgaattgattaagccccaagtatatggatgctgtggatcataaaaaatttcatcaacaccaccgaattctaagaattcaccagcgtacattacagctactctatctgccataccggccaccacgcccaagtcgtgcgtaatgaaaataattgaggtcttaacccgcttttgcaagtctttcatcaagtccaagatttcagcttggacagtcacgtctagagctgtagttggttcatcagccagcaaaatctctggctcacaaattaaagcaatcgcaattacgattctttgtctcatcccacctgaaaactggtgaggatattgattaattcgttcttctgcatttgggattcccacggccttcatcatttccaaggctttagcccaagcttctttcttagaggcacccttatgtttgattaatggctccgcaatttgctgcccaatcttcatagttgggtcaagcgaagtcattggatcctggaaaatcatcgaaatttcgttaccacgaattttttgcatttctttttcagataactctagcaaatttttgccgtggaaatcaatctcaccgtcttcaatctgagcatttcgtgctaacagaccgataatacttctggtagtaaccgacttacctgaacctgattctcctacaattgcgagcgtctctcccttatttaggtgaaaggaaacgttacgaatagctttaacctcaccagcataagtgtggaaatcaatttttaaatttttaacatctaaaactctttcttctggcatttaggttaatcctttctatctttgtccccgtggatcgaaggcatcacgcaaaccatcacctaataagttaaaggcaatcatcaacacacacaatacgattgctggataccacatctgatatggcaagaattgaaaattcttttgtccttcgttcaaaagtacacctagtgaagtttctggggctgaaataccgattccgatgaaacttaagaaggcttcgaagaagatggcagttggaatagtatacatcgtttgaataatgatgatgcttgaaaggtttggcactaagtgtttccaagcaattttccaaggtgattcacctaatgatctagctgccaaaacatattcttcatttttcaaactcagagtttctgctctaacttgccgtgccattgtcgtccaacttgaaatagcaattgccaagataattgacttaatacctggttttaataccaccaacatcaaaactacaatgattaaattaggcacggaagagataatttcgataattcgctgcattacgttatcgactcccccgcctttccagccggacactattccgtacgcgactccgatagttaaatcaaagaaagctgcaactaaagcgacgatcaatgaaatctttgtaccatagataattctttgtcccaaagatctgcctaaataatctgtacctgcgataaaatacttatctttaggcacgccattctgggcataagcatcaacccacttgccattttgcttaatcttaccgttcaacccgttaattgcgctcattcctggcactttagcaggtaaattggcatattgtgggtgcgatttaactaaagtagatttattgatgaatggggttgaaccaaaagctactacaatcatcaaaataacaataattgcagaaataatagctgcttttctctgcttgaagcgaagccaaacattttgtgcaaacgataaagatggacctgcaatgttttcgttatcctgtgcttcatcttttggtaagggttcaaaggcatctgcaggaaggtttaatttttcttcagtcatattgtcttctaggcctcgctttcatctaatctaattcttggatcaattaatccataaacaatatcagtaatcaacagaattactactaatccaatacagtaaaccatcgtaattcccatgattgttggatagtcgttagtcaaaatcgacttaacaaattgttcaccaatcccaggaacgttaaagatattttcaataaccattgaaccagtcatcaaggctacagcataaggaccaatcagagttactaatggaatcattgaattacgcattgcatgttttctaatgacttccattctacttaagcccttggccttacctaactcaatatagtcactacttaaggtatcaaccatactggttcggataaaccgagctgtttccgcaaatggtccaactgccaaagcaatcgttggcataatcgtttgagaaaattgcccccaaccagcaattgggaaccaacctagctttaaaccgatgtagtattgaagcaaaactgctaaaacaaagttaggaactgatttacccaaaatagaaattacagtagcagttgagtcaacccaagtaccctgtctcatagcagcaattgccccagcgattacaccaaggacaactcccaaaattaatgcttgtaaacctaattgtactgacgcacccaaacgcgccccaattaatgaagctaccggttggttactatattggaaggatgtcccaaaatcaccgtgaagcatccccgcaatataaatcaaatattgttgccagataggtttatttaaaccatactgttgatccataatttgccgctgagttagcgtcatctttgcttcattagcataaggtgaacccggcatcaatttcattaagaaaaaagttaccgtagccacgataagcaaagtgaggatcatataaaatatacgttttaataggtatctagccatattaattgctccctcattttattttatgctttcatttactttttaatgttgttttaattataccaaaagaaataaatatatctagttaaaatgtccaaaaaattaaaaaaataagagagaaattttgctttctctcttatttttaacttttattatatctattttgtatagtttggagcagctttggtcatttgaacatcatgtggatgtgattcacgtaaacctgcattagtgatttgaacaaattgagctttatcaattaattccggaatatttgcagcaccacaatatcccatacctgaacggagaccaccatcaatttgaaagactacatcagaaacatcgcccttatattctactcgagcttcaacaccttctggaacaagtttattagcttcgtttacgccaccttggaagtaacggtcacttgaaccgtgtgcttgggccatcgcaccaacagaccccattccgcgatagcgcttatacttcttgccattatcttcaaaaatttcgccaggtgcttcagtagtacctgatagcattgagccaagcatgacagcattgccacccgctgctaaagctttaacaacatcacctgaatatttaattccaccatctgcaatgattggcttgtgatattcacgtgcagctgtagcagcatcataaatagccgtgatttgtggcacaccaacaccagcaacaactctagtagtacaaattgatccagggccaataccaactttgacgacatcaacatcagcatcaaacagtgctctagttgcatccccagtcgcaacattaccagcaatcaaagttgcttctggaaaatgatcgcggatttctttgatcttgcgcaataccccagctgagtgaccatgagcagtatcgataacgatcgcatcagcaccagcttcaagcaatgcttctgctctttcaaaagtatcactggttacaccaactgctgcagcacagagcagatggttttgatcatcagttgcggcctttgcagcactagttggcacaactacgctctttacgttggctacttcaccagcttgcgcttgaattgacatattcttgtgcacaacgcctagcccaccttggagagccattgcaattgccattgcaccttcagttacagtatccatccctgcactgatcaatggaatatttaatttaatgttatccgccaaagtcgtactcaaatcaacttcgtttggcaaaacatgactttctgctggaattaataaaacatcatcaaacgttaaaccttttttagcgaattttgtatcccaatttgacatttaagctctccttttctcattcaaaaaattattagttttactttactagcctaacttgcttttttcaagcgaaaatcaaaaagcagaccgattttttccaatgtcattaagttaagacattgacaattaagggtgcttttttagagatcgaatcatttggattcgatctctttttttgtataaaataaaggcgaaaagaccagccttttcgcctatcttatatattatatattttaaaccttcaaaattattgccagaaagatggtgttaattatgaaagcccttcataagaatattctagaacgtcttgatcaaattatcaataatactggggatcatattcacgattttattaataatcctcatgcttttaccaggaaacgcactttagatgcagcgacagtccttaaaactacaattaacatgcaaggtcagaatttaaacagtgaactctttagagcttttggcgaagatgcaactaaaaagaacgataaagtagttagtacttctgcctatgttcaacgcaaaagccagctttctcctgcttgttttaaacatattctgactgtttttaatcaaaatctatttaatattcaactttttgatcatcactaccgtttgtttgccattgatggctctgactttaatcaaatctggaatccgaaatcgaataacattgtacaagcttcttctcataaaaagaaaccctattgtcaaattcacgttaatgccttatatgatctattgaataatacctaccaggattgtatttttcagcctaaatcagaaatggatgaacgcaaagcggctgttcaaatgcttaaagctttgaattgtggtccatatattgtaacaatggatcgtggctacactagtttcaatatgattgaaaactgcaatcgcctgcctaactgtcattacataatacgaactaaggctggacaaggcggagttaaagaaataacgacattgcctgatcaagaatgtgatcgtgagatttcctgcctggtaactacttctaactattactacatcacgcataaagccagtgagaatattcaccatgtccagcatcattatcgccaatatattaagtatcgctctaaaaatacccaggatctaagctgggattttggcgagttatgcacaataaaatttcgagcctgcaaatttagaattaatgatgccaaatcaggcaaagaagaatgggaagttgtgctaaccaatcttgatcgaaaaaattatccgctaaaaagaattaaagagctttatcatctgcgttggggtattgagacctccttcaagaaattgaagtattctttaggcagtgtacagttccattccaaacaagataaatttattgaaatggaaatttatgcccatatgattatgtttaatgcaatcagtcaaattgatgcacaggcctatattccgcaaaagcattgcaagtatcaatatgccatcaatttcaagcaatcatgcttgattattcagagcatgtatttggcttcttctttaacgcaagattttgaacggatccttattcagatcagctattataccattccaattagaccaggccgcaaggacaagagaaatattaagcccaaatcagctgtatattatttatatcgcgtagcttaaaaaagcagaatctgtgctatgccttatttgttgtacgaaaaaagcaccaatttaaccaattaaatgttaaatcagtgctttaaaagtctaatattaattgtcaatgtcttaacttaatgacattggattttttcggtctgctttttaattacatagaggagttgtttattgttataagttctattatttagatatttaggattttagtctacttttcaacataagcatatttgaagttatagttagctccagcaccattatatacaacgcccttgacagttggacgaaccatccaagcttctgctggctggtaaagtggtactacaccttgctcagttaacaatacacgttcagccttagctaagtcttcaaaacgagtattttcgtttccagtagttttagaagctgctacatacttatcatattccttattagcccacttgccccagttgtatgaagcatttgaggtgttcaagtcaaggaatgagattggatcagtaaagtcagcttgccaacccatcagtaaagcatcaaagttaccattttgaccacgaactaaggcagtctttttaggtaaactatttactctgacattaacgcctttcaagtttgactcaatagtactttgcaagtattcacctgcttttttggcatcatcatcgtcataggttagcaaagtgaagttaactttgctctgtcctaaagccttttgtgctttcttccaataacttttagctaaagtagggttatatgtcattaacttatcagtttcagcagttttgactaattcagtataatctttgccatttacttcagtcatactatttggtgaaaaggtagtgactggcttgttagcaccacctacagctgaagctaatgccttacgattaaccgataatgaaagtgcacggcggaagtcagtattttggaaaagcttgttcttttcgtttaattgtaaatattgtgttgaagaagctggtctaattgtataaccactctggttcttcaattgttttgtagcttgtggtgccaataatgctacatctaattttccagattgatacaagttatagtcagttgatggtgtcttttgcacgctgtaattaatcttacttagttttaccttgcctttgtcccagtaatctttatttttaactagcttccaagacaagtttgaaccggtccagccttttgatacaaatggtccgttataaaccattgttttagatgaggtaccataatttttgccatacttttcaacggcatgttcattttgagggaagaaaaccccgaagcccatcaatagcttaaagtatggaattcttctatccaaagtaacggttaaatgttggttatcatctgctttaacaccgagtgtttcaaccttcttctttcctgctactacatcatccgcattctttactcctgagaaaagataagcatattgtgaggcagtctttggatcaacagtcctacgccatgaatagacgaaatctttagcagtaactggatcaccattagaccatttggcattctttctcaaagtaaaatgccacactttaccatcctttgatacctcagtcttagttgccaaagcattttccaccttggaatttttacctaaacgatagagtccttccatcgaattattaatttgatctaaactagttgcatcagtcaccttggacaaatctaaagtttgtaattctgatttagtcatccaattcaaggtttgcttggtaccagatgacgaacttttatttgaacaggctgccaaagttgcagctgatacgacggttaataaacttgcactaaaatactttttccactttttcattttgaccctcattcttttttattacaaaaaggagcaaccttcacatggttgctccttctatctattcatcaaatcatagctagactattattacgcaattacaagtgaagagagattatttttatgtcttgtttgtaaaataataattgctgaaataataatcattactatgtcctcctgattttttaattaatttgctacataagtattcttgaagttgtagtttaagccagcgccattgtagacaatgcccttaatgtctggacgaactaaccaagcttcagtcttgtagtaaagtggggcgattccttcatcgctaagcaagatcttttctgctttttcaaggtcatcccaacgcttagttgtatctgctgtagtcttagaatcagcgatcaacttgtcgtattgggagttactccacttaccgttattttgtgcattcttgctagtaaacaagtcaacgaatgaaattggatcggcaaagtcagctgaccaacctgaaacaacaacatcgaagttaccactagttgaacggttcaaacgagtcttgaatggtacgttagctactgaaaccttcatacccttcaagttttcttctaattgactttgaagtgtttcagtcgtcttttgacctgaatcagtatcatcagacaggattgtaaatgaaacgttcttaacgcctaattccttcaaagccttcttgtaaagtttcttagcttcagttgggttatatgcggcgttcttcttatcaccaacaacttctgaccagtccttaccatcatggttaactacaccctttgaagttaaactggttgctggggtattagcaccacctaaagcacttcccagtgcctttctattgattgacattgagattgctctacgcaagtcagcattttggaaaatcttcttcttttggttaaattgcaaatagaaggttgctgcagtatcacgcaaagtgtaacccttttgatgttttaagttcttagtttgttgtgaatctaaaatagtagcatcaagcttatttgattggtacaagttgtaagctgttgatggtgtcttttgcacgctgtaattaatagcatcaagcttaacattcttcttgtcccagtaattcttgtttttcacaagcttccaagaaaggttagaaccagtccagcccttttgtacaaaaggtccgttgaaggctgtagtcttagatgaagtaccatacttagagccattagcttcaaccaccttttggttttgtgggaagaacaatgggaatcccatcaataatttaaagtatggaattcgtttgtctaaggtaacaactaacttattatcaccttcagcctttactcccaaactattaactggtgccttacctgcagaaatctgagtggcattatgaattccttcgaagaggtaagcatattgtgaagccgtctttggattaacggttctgcgccatgagtaaacaaagtctttagccgttaacttatcaccattagaccacttagaatcacgcaaggtgaaagtccaggtcttaccatcttttgacaccttggtatctgttgccaaagcattctcaactttagaattcttacctaaacggtataaaccttcttcaacgttacccaattggttaaaactggtaacgtctgttgccttagaaatgtccatcgttggaatttcagccgaatccatccaattaattgttttcttagctgatgaacttgacgaattagaattactaccacatgctgctaatgttgagccagcaatcaaaacggttgctcctgcagcgaataacttggtaaacttcatattattgctcccctcgtttatgagaaaattaatagaactctttaagttgtttataagtatagctaaatattttttgctttgcaagttttttttaatattatttttaatttatttaaaaaataagcctcaatgctgatgtatcaaggcttattcaaaattaaattattctaaacattccattcttgcataaattcacgtacaaagtcgcgcatgtatgcagttcgtctttccgcttcttttttggcagcaggagtattcattaaatcttctaaatgaaaaagtttctcataaaagtggttgattgtggtttcgacatggttacgatattgatcatgactagttaaaacggctggcttaatctctggatcgtaaatcttattgccatgtttaccaccatacgtaaaggcacgggcaattccaatcgcacccaaactttctagacgatcagcatcttgcacatattgtccagataaaggcaaatgatagtgatgctcaatattagctgaaaatgacatgtgttgaatggtgaataaaatatcccatgcctccagttcattaaaccctacttgcggcaataaaactttaatttcatcaattaccttttgtgggtcagcacatattttttcatcaatcgtgtcatgcaaataacccgctgttttaataatagcaactacccggctatcttcatgagcatcagcatgatctgctaaatacatttgactagccaaattagctacacgttcgccatgataaaaatcatgacccgttttttcattctttaagtgtgtttgagtaaaatcgataacttgtttaatttccattatgccattgagtcccatgcttttaccggcgttgctttgccttcccaaatcttaaccagtttttccggtacatattgttttttaacaactactttgaagagatattcatcaaaccagttatcatccatcacaaagtagcctttttcaccgaccttgtttccccatgagttttcaattttccattgacgtggctttccattaacaacatccacaccaaccatcgtcatggcatgagttgaacccgaagcaccagtttccagtctctcttttttgcttaacttagtttcaatattaaaaatagcatcagtttgatagaggttatgagctaaaattcccttttgacgatcgctatctttacctacatcacaaccaaaccaaaaagtttcgcctgcttcaagttgcttaatcgcagcttctttaagattttcaattttagtgtttaagaaatgaactggacttccgccctctacattgtcttcaaatggcaaagcatacagcttatcaaattcatgatctggtgcattgaacaaaacaatatagtcatccaagtcatcagtaaagtagtcgtgaaagaaatcaagtggagtaagatcaccatcaaaatgatacttaccttcatcatccttaaactcaaggtcaaatttttgtactggttgaccgaaagcaattactgccatacggtaaacctcactcaaaaattcttgacgtttagcttcaatttcatcatttttacctgcttgagctaacttacgcaacacaagtccatcttctcgcaacttattattcaaaatacgattgaagaaagcagtattgttggcagtgaaactttcatcttgagcataggttggcactaagccgtacttcctaatcaaagaaacagccatagcccattggccaccatcagtatcaggtccctgcatataagtatgcactgttctgtcactaagtggacgatctgcggtattcaaaatattatcaaagaaaatatttgctcgttcaattcgatcccagaagaataaataattttgtgaaaaagtaaagtttttagcattatacttcttagcaaaaccatgacgcaatgtattcaaggccgcaaatagccagcagcgacccgattgcttttgatcagtaacattatcagttgggatttcaattgaaaaagtgcggttcaatttcctaaccttttctgaatccaaactagccttagccacaccattattaacaacagccaattccgcaacccgattttgtggtttttgctcatattctttttgaaatttagcaatttcattcattgtaagttcatgcttcataaaatttttcctttcttgccaaaaacaacaactaagccgcttcccaggtttgaactggggacctcctccttaccacggcggtgctctacctattgagctaaagcggcgtcttcattataccaaaaaaggcgaagacattcatttgaacatcctcgtccttatttattctctccaagtatttttagaaaataagtattcaaaacggttattaaatttgcttttatttagttcttaacgacgtctttagtattcaaccattgactcttgttgattctaacaatcttctttttattaaccttcttaacgtcttttgcggtataagtagaacccattgcaacttttttgctagttttttcagcatttttattgtaaacagctactttttgatttttggtgtctttaataacaacaaagatcttatcaccctttttaatagcaggattggttggagcttgtgttgcagtacccaatttaggagcagtaaatgaagtagcttgagcaataggagtaagaacacagcctaaactcaaaccgattaccaaacttgaaataatcttaatagctttcttagattctaacattttaataacctctttctatttacttactttctctttacactattactataacactgtttgattagaagtaaagcagatagtgctgcttttcacatatttttattaagagtcagtttttaatagagtgctttgcatcagcatttgcaaaaggtatacgcagctattttatattggtattacacttgaaataacaaattgtatagtaataatgtgaatttgtgaataacttaataaatagattgtagcaattgattttagaaaataaaataacaatttaagaagtaaaatattattttacacaaatcattatctttatcttttacaaatattagttggtagtaaatatctccgattattagctaaaaaaatagaggaaaaaatccctctatttttatatataaaatgttaaaatcatatatttaattacgcgtggtgctagttaaatcgttttagttaataaaaaagtccaatcttgttagactcaacttgtataataatagaaaagagcctgatctgattgaactgccttaagcttaagcgttttagccaccatttacaagttagttttaaagatttagtgataatttgtcggcactggtatcgtttgtatgcaccggctgagtttactcatcggcgaaatattgatcaaattaaaactacggacagtctgattttggctttacttatctggcaagctaagacaggaattgaatcacaaagaagattctgtgaatgtttcaattgtttatcacactcacgttttaatcgacgttcacgtcagctattgcaattgatttatcagatacggcaagaaatgaataaaaaggttgacctgaatggacatttcttgatcattgacagctttccggtacctgtttgccaaccaattcgcaactatcgtgctaaaatttttcgcggttatgccaacattggttataaggccaccaagaaaatttacttctatggtttcaaagttcatgccattgttagcgatgacggttacattcttgattatgtcgtaacaaaagcatcagttcatgatgccaaggagacagttgaactgctggaaaatgcccatccatctaattactatcttcttggcgacgaaggctatttaggcaaagaactgcatcaacagctaaaacaaatgggttatgaactttggacaccatatcgtaaaaatatgacaggagctaaaaagcacaatgatcatcaattgatggctattcgcagaacaattgaaagcgacttttcgcttctgacctattacaatgccgagaacaatcgagcacgtagtctgataggctttcaaagccggttggaaattgcaattttagcttataatttggcttattgtctagaaagatttaactagcaccacgcgtatttaattatttaattgtaactaaagtatactttctctttcctttacgaataataacgtacttaccatcaaagtcacttgatggatcaacttcgaaatcagtactttgctcacgatcgccattaacataaatggcaccattctttacatcttcacgagcttgacgtttagaaggttcaatcttagtgtcaactaagaaatcaacaatattcttcttttcattgccagcttccgcacttggagcattcttcaagccttgttcaatttgagcaactgataagttcttgatattgcccgagaacaaggcatcagtaatcattttagcttcttcaagacctgcttcgccatgaacaaacttggtaacttcttcagccagcttcttttgtgcagcacgtttccaaggttctttctcagtcttttcagctaaatcttcgatttcttcacggctaaggaaagtgaagtacttcaagtatttaaccacatcacggtcatcttgattaatccagaattggtaaaattcataaggactagtcttttctggatcaagccaaacagcaccaccagcagatttaccaaacttagtaccatcagccttaagcatcaatggaatagttaaaccaaaggctggacgatctgcgccttcaagcttatggattaaatcaataccagcagtaatgttaccccattgatcactaccaccaatttgaagttgaacaccatcatctttattcaagtggtagaaatcaattgcttgcaaaatttgataagtaaattcagtaaatgaaataccattttcaagacggctagctacaacatccttgttaatcatattgttaacttggaataacttgccataatcacgcaagaagtcgatcaagttaagcttgcttagccattcagcattgtttctaatttcaaaattttcagtaccaaataacttcttcatttgattagttaagctttcttcattgtgcttaacttgttccgcagtttgtaaagtacgttcagtcttacggcctgatgggtcaccaatcgcaccagtaacaccaccaattaaaattactggatggtagcccgccatttggaatctcttcaagatcatgaatggaataaggtgtccaatatgaagggaatcaccagttgggtcagtaccacagtacaatgcccaatcgtcatgttctgctaagtactttctcaaaccttcctcatcagtttcttgattaatggcaccacgccattttaaatcttccaaaatatcaaattttgccatagtttttcctccaataaaaaacgtcccctggtcaaaagaccaagggacgactaaattacattattagccgtggtaccacccacgtttgcgctgctgcgccttattcaagccggtaaaggagcaaccctattaagtacttcgctaaaatcggcctgtctagctcacaccaaccgctagttctctgaacgctgagccgactcgctactcatttgttagttatgatattaacgagaaaaatagttttagtcaaccgctattttacaaaaattgttttaattgcggaccatggaccagttttttcaccattcaatgcttgcaatttcacttcataatttctatttctagtaataccagtaatcgcgttagtagcctgatcagttacttcatagtaccacttatttgtacctttttggcggtaggcaatgcgataactttgtgcactagcaattttattccaagccacatgaatgttgtgataagtactgtcagctttagcagtggttaaatcaactgcacctggtgttgcatctgaaggtgcatagtaagtgtgttctactgaattactccaagcaccaaaataattatctttttccggattgccgtaacgaatgtaatcaggattgcttacaccgcgagctacaaaatagtagctttgaccattaactaattttttaccaattgaaactgggattttacgatcatttttgtctatgtaacgtgtagcaggtgcagtacttacttctgtagtattgctactagaagtgaatggagctgcctttgagcctttttcacgccatgcaagttcataagtcttcgcatgacgtgcatcccttaagttagcaaccataccatccttagtgttttgtaaagattctatctcagtatctgccggtaccacacgcgtatcaggaacagccgttaattgaaaattataaagtccacgagtatttacactaaaagtataatttcctttagacaagtaccagctttgactagcaatcttattgccattaatttcgaaactctctgggtaaagcatcgtactaccgccaactggattattttcactgaacatgattacattcatcttgctgaaaatgttaccttttccaagctgataaatcggattattgatcatcctcatcgtaaccatttgaggtgagtcaatagtaaatgtgtagtagtcgacactatcgtaatcgtacatttcacccattgctttaatatcttgaccaatttcaatctttctagctttaagactactgttgtcattattcttctttgtttcaacgtaagtttctaaattcttacggatcttagttaaacgagtataagtagtcttcacactaatattctttgaactagttaaataatatgtgcctttacgcagataatacgtatttttgtccttaccataaggaatacaggtccattccatactattttttaaagtaacattgccattagtaactaatctaccagctgcgggtaaatggagtttataaatctttcccttagctacatagttacgcctattaatattaaaactggtaatgttcttaggattatatgtcccagcttgaacagttgttgcagaagatccaaatagtgcagcactggctagtgccattgttattatctttttcattctaatcacctttaaatcagctaattatcagttattcctcttagcccttattttatcattggatacaaaacattctaagctaaatagtgaattagttatccgacgggataattgattcactatttttattcttttgtagaattaaagtagtagtaaaacgatatgccctgaggtctttagacacttgatgtcgtatacaaaactggcagttttacttaagttttcaatagtctcttcgaagaatgtggacactagatgtcgagtttagaaaattagatctgatttcttaagtaaatacgttttactactaagttttggaggtttttattatgcaagttacttttggaattgatgtaagcaagtctacttctactgtttgtgaactaattggtgaaagcaaaaatgaactaaccattactaataatcgtcctggttttattcaattgcttcatgaattaaccgctttttctaaacatccgcaaattatttttgaagctaccggtgtttattcacgtacactgcaatcttttctggaagactatggctatgattatgtaattcttaatcctcttaaagctaaaaaagaaatggatatgggactacgtcataataagactgataaaactgatgcttatcatttagccttaattcaaagactatatcatcatccaattaatcaacttcaatctcaaacttataagcagcttaatgctttgagccgcttctatgaccagttaacagctgacttagtaatggctaaaaatcgacttcaccaagctctacaatcgacttttcctgaaattgaaaatctattttcttctgctaaaggtaaaaattactggcaaatagttgtgcgatatcctcattgtgacttagtaagaagagaagataaaaaacagcttattaactggttaatgagcttaaaggggattgcttttaaacacgctctaaggactgcagataaattaattgaattagcttatcaagcttatccagttgtatcttgctctagcatagaagtcgagcaagtgcagtattatgcacacagattgcttaatttaagtgatcaaagagaaaatttaatcgcaagaatggttaagttagcgaagtctttgcctaatcatgatttagaaaacctagaaagcattccaggctttgcacagaccactgctgtcagagttttagcagagttaggagatttacgcagatttagtaatcctaataaaatcaatgcttttatcggaattgatccaggcagatatcagtcaggagaaatggactctaatttaagtattactaaacatggcaatgcagtcgcacgtaagttgctttatcgagctattggacaaattgataatgcagctaagacaaatccgtgtcatatagcagattattatgaaagcaaaaagctatcctctcaaaccaaagggttcaaaaagatagctattgcttcaattcataaactaatcagaaccatttatgctctgattatcaatgatcaactatatgattacaacgtagccacacataaccaaaaagactttagttgtaattaattgatcaagtacattataacgctaagcccataaattaaatatagaggtgggcttatttagtatgctttctaaaaaaataaatcgccactaaaagatactcatgacaaaatttaggtaaaaaataaagccaaacaccttattgcgcttgactttacgtagaaaaaagaccgaactttacgttcgatctcttttatttagtcaccgatcttgtaaaagcccttagcttttaagccataagcttgaccagcagtcatatcatattgcaccatttcgtaatccttcaaaattgcttgttgttctgaagtcaatttctttggatcaacgaagtgccccttttggtcaactaattggaagccttgatcaccattgaagttaatcgtgattgctggcaacttcttgtgaacttctgttaacaatgcttggtaaggagttaccttagaattagtttgttcaagcatcattgcagtaaagtcactagtgttgacgtaattagagttgtgagtcaacttgctcttagcaccatgttctctagcatacttgttagaataaatgaagtagcgagttgagtgcatttgcactggataacgactagcgtagttttgtgacaagatacttgggtagtggtccccatagaagacaactgtgattggcttcttgatcttatcaatcttaccgataaattgctttacagccttatcagtgtattgaacacccttcatgtaagttgccatttgttcacgaatagcagcagtgttgaagagttcaccagataccttgcccatgtattcattgtttggataccaattgttgtaaggcatgtggttctgaattgaaatcaaattaatgaattgaccacccttcatgctattgatttgtttcaaaccatttgcataagtagtgtaatcagaattataagttgatttaccaagtttcttttgatcaatgatcttatatttagagccaaggtaaacaaacttattaaacttaaatctcttatagtcttctactcttgagtagtaagtaccaatgaatgggtgaactgcagacttataattgaagtccattccgaccgttggatagaaatcatggtttggcacaatttgaacatatggcgtcaaggttgacttgaacattcccatgttgaaaccggtcaaagtttcccattccatgttggcagtaccaccaccataacctgcactaagcatgctaccgtaagtagatctcttagccattgattgaataaatttaactggatttggcaccttaggatcgatctttacagttgggaaagtatatggatcaacaaaactttcactcaagttgtaaacaatagtttgattctttagagtattctttcttgttttgttaatttcattagcgatcttgctgtacttctcattcaaatgttgaattgtagattttgaatagttagttggcttattcataatctgcaggtcaaagtaattcaagaagttcaataatggaccgttaatttgaatatcacgttcagggtttctaaacgattgcttattatcaaagccacggttaatgtgataaataattccgccatcgtggttaaagcgcactggtgtcatgaacaaaagcaaactcaacaatgcccaaataccacggcgtttccatgagccctttttcttaattggaaacttaattgcaagaaagacagtcaatgcaatgataattactaaggcaatagcgatcataattatcttttgttggccgaccattggcatcaaggtcttccagttaacaatttcgtctaattcagttggataaattggttccccacgaagatctaatttaatcttgttggcaatagcccaaccaattgtaattacagttactaaaactgttgaagtccagtaacgcgtagtaatgaagtagaaaattgcaaacattgcatcaaggaagattgctgtcaaaataatagcgaagaatctagtcccgagcaagaaaattacggcattgatatcagttgcagtcgtaatttggatccgcagattatctgattcaattaagaatgaagcaaaacttaatacatagaaccagccccatgtaagtagtcgtactcgattttcaactatccaagcagtgaagttagtccaagcatcttcaacaatttctgctaagttattatgttgcttgaaaaaagcaaccgtccgtttaaccggcttcaccttgaataaatagcgctcatatagccagcttaagccccaggcagctagcatcatgatgacaatcatcaagaacttgttaaatccagcgctattggtaaagcggaacgatttaacaaaaccaccaataattggagcgtccataaaaataattactggaataaagaagtgcatctgcttagcactatagctaacaatcacttttctaaagattaagaaggctgctaaaaccattaagaacaaaaatggtgaagcaatattacttaaaaatttaggattccaggaataaacgccacttcgaccagataatcgttggtaccagtaaaccccattaaatccgggaataccgataaacattacgaagaaagacattactccagctgcaattgaccagccaaagacctttttaggaattttaacgttagctaaaaacatcccccaagcaaagtacaagatcaaataaatgccataaattgacttgttaaagatcattgtacctgcactagtcgcaaaaccagtcaaagttaatgcgctaagcaataatacattttgcttagtagtaatgcgatgttgtaattcatacaagtatggttgaactagcatactaaaaatcaagccagccaacaatactgatgtactagtcaaaactgggaaaaatactccccagagcttccacatattaaaggtacctggtcgtttaaagaagttcaccaagtataaaagcactagtgtaacaaccgctataatccaaaacttaaaggcttcagttggatgaacctttcttttgctataaacagcaccaaagaccattggtactagtaccatcgtactgtgaccaagtagtcctggaataaatctcattagggtacttaatggtaatctaccaaaagtgctaccccaagaatacatctgcactagcataaagaatgctgcgacaatcaaacaaatgatttgaagagcatttagtgattttttcttgttaatctcactcattttctctagtctgtgtcctcactaaaaatttctgtcattacttaatgatccctagcttctttttaattgaaagcagaatatcaacctttttgccatgaccggtgaaaaagtctacgatatcatgccagaacttaaagcacatgatcaaagtaatcacgataaaaacaaatcctgcttcttgattatgcaagaatgtatttatactgaataaaagcataaacactaaaggcggaatcgtcaaattttgcataattgctgttaataccaaagccactaataaagtagcaaagccagctttccaattataaaaaactgctacctgagctgcaaccgcaactcctttgccacctcgaaaatgatcccagattggaaaacaatgtcctaagatcaggcctagccctgtataagcaatattaatatgagctggaaaagcaaaatatacaataaacaaggcaattaaacttttaagcaaatcgcctaaacaggttaaaataccccattttttaccaaaaacagcacccatgttagccgttcctggattatgtgaaccgtattcagtaggatttatttttaaaaagattttgccaacgatcatcgccgttaagaaatttccaaaaacgtagccaatcagagtagcccaaatgcgcgccattaattatcaccttcttcggtgtaatcatagatatgatagtgctgcgttttttcgctcttaaagctaaagccatttgcaatattcttttcgttttggaaagtttcattatttgaaaccgtttccttaggtaaccctaattctttgcgcaccaggttagaaatccgttgcaattcactagttggctgtacttgataagccgcatcgtcgatcattgcattgtaaccatgtagataatcactagatgacgaattggcacaactacgataattcatcgcaatctgctgcatcgcactaaatggcaagttagtccgaacattgcttgacacagaagtcaaaattgaatccagatttgataatgaactaattgaaactgccttcttgatcaaggtggtaattacctgccgttgtcgttcttgacgaccataatctccacgcggatcatcataacgcattctagaatatgctagcgcacctgcaccacccatatgggtcagcttgccctttttaaaaatataaccgccatattcaaagctaagcgttggtctaatattaattccgccaacatagcgaatcatcttcatgattccacccatgttaaccacggcataatacttgattggcacattgattaacttagaaactgaatccattgacatcttagccccgcctaattcataagcggcgttaatcttttctgtcttgaagctctcgcttccaaccatctgtgccatcgtatcacgcggtgttgagaccaatgtgtaacgcttcttagcagggttaactacagctaaaatcatggtatcagtccggccgcgcttttcagttcgatcaagggcacctgtatcagtccccatcagtaaaacagcgaacttcttctttccatcaaattcacctgtagttttcactgcagtcttaggatcataggtcttatcaaccgctgacttagtacggaaataaactgatgcaaagtacgccgctccagcaaccgcaagcaaggctacgatactaataacccagacccaaatatgacgatttttataactgtgtgtgtctacccgactattatgcgggtgattagatctttgttttctatctttcataaaatatacctattatgatgtaaattcacattgaatgtattataacaaaaaaagcaaatcatcgctgacttgcttagtatatcttattaaaatcgttactaatttttacttcaaagtcaagcttaacgcaaaattacggctactttttgcctctaattcaattttatccgtaaaagctgtaacgcttccttcttttgcactcaacttaaaatcagttgaagtaagatcaatgccatgttctttgccagtcaaactaatcttattgacctggctttcactttgccaagaagttggtaagataaagcccaaagaaaatggcagttccttatttgaagaattttttaaataaaaggatatattgacttgattaccctccaaagcataagtagtcattacttcaaaatgatatggaaaactcttatagctctccggcgtatcaattaaagttagacttacgcgagtatcacctttgtcaacaacggtccaaggcaacttgttagccaaattatcggcttgatccattactggaaaagcaagtgccataccttcttcactttcttgctcgccgagataatcaaattgatctgttaaagacaccagatgtgccatccgggccccattctcatcgacagagacttgaaagagagaattatcgattgtttgcatatttttctcccaatttctacactcctgtaactcaaaatagcacttatcatatacaactgtcaattttcaccactttcttagaaaaaaatggcgatctttctttatttataatataatgaagttgttccaaaaaaattatgaaatcaaagaaataattatagtttttggagcaagttgatacaaagaaggcatcccttaacggtgatgccttttttggtgtataaaaaaactccgacttacgccgaagttctatttgtgtgaataactacttaataaattagtcgtccaacttttccttgttaacaacatccaagttttcgtcgaatgtgtaaacaactggttcaccggtcttcatttccaagttcataatgtcttcatcagaaatgttttcgatgtacttagtcaaagcacgaagtgagttaccgtgagctgcgataattacgttcttgccgtcaagtaaatctggagcaatgtggtcttcccagaatggcattacacgatcaagacatacgtgtaagttttcagccttaggaacgatgtgtgggtccaagtttgcgtaacgacggtcatgtgcttgactgaattcgttgtcatcatcaatagctggtggcaaaacatcgtatgaacgacgccaaatgtgaacttgttcatcgccgtacttttcagcagtagccttcttgttcaaaccttgtaaagcaccgtagtgacgttcgttaagtctccaggtcttagtttctggaatccaaagttggccactttcttcaagtgcaaagtgcaaagtcttgatagcacgagttaataatgaagtgtaagcttggtcaaattcaagaccgtgttccttgattaaacggccagccttcttagcttcttcaacacctttttctgaaaggttaacgtcaacccaaccagtaaattggtttgaaaggttccattcactttgaccgtgacggattaaaactaattttgacatgaaatatctccttttaaaattcaatgtttcatccatattttacacatttcacaaattttttcatagagttaagactaaaaaaatcgtgttttttcaattttgtaacgttattcttgctatactagaagaaaaaatttaatgaaagaaagttatgtatgaaatttaaacatcaaaatattatcattaccgttttattagcattactctttttaacggcctgctctaagacaggttcaaaaaagacagctaatttacctactgccaagacgattttaaccagtgcagaaaaaacgaaattcagttcaatgcacgctacttggaatgaattaagcaatggcaagtctttgcaaaaagccgaagcccaatatactaaaaagccaacgattatttatgctaatgtttctagcagctctaatcactataaaatgtggattgagggtaaaagcaactatatccaaatgaaaggtaccaattctcagcgttggtttaagacaaagttgtctaaggctagtgcctatggtgccattaccgacaatttgaacggcacattactcatgcctttcatccctaacgcaaaatattttaaggtaaagcaaaacggcaatgattatctgcttacttataaaggaaataacaaaaaaatttggaacgcaattgtatctgattctgcctttactgctttaatcggcatcgatcttgatgatgttaaaccaattagcaacgaaatcaaaattaacgtagatcagaattacgacatcaaaaatgttaatgtgacttctacttataaggatgaaggacacaaaaagaatttcaccatgcagattgatcaaattaatcaagtcaaaaagttgacggtacctgcttctatcaagaaatcggccgtagatttaggcaaaattaatacaaaataaagtaaaagaatagtccgtaactccaacgagcaacggactttttagttataatagacttattgaagcatagaggagaaaaaaatgaaacttaagaaaacgattatcggtttatcctttgctgtcctctttttattaggtggctgcagtaaacaagagaagaaggctacttcagctctgactaagactcaagttgtacaaaaagctaaaagtagcttcaagtcgggacaggttattcaatctgttactctgggtaccgacacttctaatcaagttgccttagctaacactacctttggtggtaaaaccactgtttaccacatcaccaatcaaaccactagcaaaggtaaaactagttctactgaggaatgggtcaaccttaacaatgtctacattaatggacaagatacttggtacaaggctgaccttgaaaaactaaccggtcataattatgccgacttaaccgatgccatcatgaataaccacatgatcaccaatccaagtgataagttggtttctgcttataaaatgaaaaaaagcaaaaaagatggtgtttacacttatactttaactgctaaaagtactgaccaagctttgatgaaaaaggcagcagcaccaatttttgacactactgctcaaagtacaaatcaagctaaaattttcagccaaattaaaaaattaggcaagtaccaatcaatgaatgttaaggctgtaattaaaggtaataaattatctacctttaatgtctttgttaatatgaaactaggtaaattaatgtacgttaaagttggtcaaagttatggcaacttcggcagccatgacttcttaagagtaccagactctgcaactaacgctaaagatttaccaaccactaatactaaaaagaagtaggcaaaaaaatgaaattaggaattattggcagcggcatgatcgtccatgactttttaacaaccgctgatcaagttgcgaatatgactgtaacggctatttcctcaactaagcgcagtgaaaatattgcccgggaattagctaaaaagtacaacatcaaacgtacttatacggacaatgaagaattaatggctgattctgaagtcgatacagtttatgtagcggtgccaaacttcttgcattatgagattgctaaagctgctctagaacacgataaaaatgtaatctgtgaaaagccatttgttcagagcaccactcaagcaaaagaattaaaaaagttagccgacgaaaagggtttgatcatcgttgaagcaattactaacctttatttagaaaacttcaaacaaatccaaaaagaattgaacaagatcgcaccaattcatattgttaacctaaattatacgcaatattctagccgctatgacgcctttcttgaaggcaaaattgcgccggtttttgatcctaaaaaagatggcggtgctttaatggatttaaatatctacaacattcatcttgtctcggcattgtttggcttgcctgatcaagtgcaatattatgccaacatgcaaaaaggcgttgatacttctggtattcttcacctctcttatcctgacaaacaagcctccctcacggcatcaaaagatagctatgtaacgccacgttcttttatcgaaggtgaaaaaggtagtatctattttgacggctcaacgggaacacttgataatttcacagttgaaatgagaaatgagcaacctaagcgttataatttaaataaatatccgcaccgaatggcagctgaatttaatacttttgcccagatgattgatcaacacgatacgcaaaaagcggatgaagcatttgtcaatactttagagacaatgcaaattttgactaaagcaaaaaattctatgatttaaatttggaggaaaagccattgaaaattttagtaactggttttgatccttttggtggcgacaagatcaaccccgccattgaagcagtcaaaaaactacctgactcaatcaagggtgcaaaaattatcaaattagaaattcctacggttttcaataaatctgcccaagttgttcatgatgccatcgtgcaagaaaaaccagattatgtacttaatgttggtcaagctggtgggcgtgctgctttaaccccagaacgagtagctattaatattaacgatggtcgcatccccgacaacgatggttatcaaccgctcggtgaacctatccaagccgatggcgacacggcttacttcacccaactaccaatcaaggcaatggctaaggcgattcgcgctgttggtctacctgctacagtttccaacactgccggtacttacgtctgcaaccacatcttttatcaagtgcaatacatgcgagctaaagaattccctagccttaaagctggcttcattcacatcccatttttgccagaacaagttgtcaaaagaccaagcactccatcaatggcattagccgatattgttaaaggcttaatcgctgcaattggggctattgttgagcgcgatggacaaggcgacattgaagcagttgaaggacaaaatcattaattacgtaaaaaagaggttaaatgcaggatttttgcatttagcctctttttatctctaattttgatgactaagtaacttctttactcgatcagcaaccttaaattctccagaaaagatcaagatatcattcggctcaataacagtccaaccgtgtggtattaaccactcatcaccacgccgaattcgactaaccgtaatcttgtccacaaattccagatccctaagtggtcgtccagtataggaagtacttctcaccttaactgagtacaacacattgttagtatcagtcataatcttgtagaccgttggagactcaatcaaagctcgcatcagagcagaacgtacattagtaaagttgaacaactctactcctgcctcctggcatcgagccatcgtattgctatcgacttcattcattcgggcaattgctcgtttgactcccaagtctttggcatattccgccattcgtgcattttcttgatcatgatgccctgcagctacgaaaatgtcgcaatcaaaggcaccactacgctctaagctttgattatccaaattatcaagtaatgttaaacctttaaccctactatcataagtttcgtattggtcctgctgatcggtaaacatcttgatcgtataccaattatcatgcaaatcatgtgcaactggtaccgtaaaagtattggcacccacaatagtaacagtttctttcatccgatcctcaggtgataaaacaaagtttgaattaaagacaatcggactcacgatacaaacaataaccgcagctaagataaaggcatctgattgtgttgaagtaattgcatgcaattttctagcaacttgtagagttggcaaaacaatcgtaattgtagtagcagttaaaaagccaccagcaaaggcatttttcttttcaaaatagcgcatataaagaaaaactacaggagctttagctaagaacaagaaaatgaccaaaactggcaacaacatcaatgatgatggatgagcaaatagtgactttaaattcaagcccacgccagtcataataaaaaagattgggataaagaacccataaccgattgaagttagcttatctttagttgcctcgcttggttccaataatttcattaccatcccggccaagaatgctcccaaaatattttcagcaccaactcgctcagctacagtaactaaagcaaaaatcaagaagaaggctaaccgaatatccaattgagtcgttgccttagttactttgctaaaccataaatacggttgcttaaaccgccgcaaaagaataatcgcagcgataaacagtaagataatcaaccaaagctggccagcattccctccattaactgaggcataaatcgttaataagagcaacggtattacttcgcccaaaaccgcagttaacaaaattgtctgaccaatcggtcggccaagaatatccttttccttcaaggtagcaataactacacccaatgcaatggtcataaaaataatcgctgccaagataacattgctaaatagccctatcagctttaaaacatatgccaaaacaaaggccattaccacaattccagcgaaagctgttaaagctgttggcaacggatcgacagtttttcccgcctgtgatttagccttaggattattcttgcgctgtagcaggtcaaaattaatttccattcctgataaaaacatcagcaaaattacgccgaggttcgataaaaatgttaaatcatgtatcgaaaccacgatattaaatccgctcgaacctacaataattccgacgataatttcagcaatcgccgttggtacagtgcttattttgaaacgcgccataaatattggaattacgagcgctaataagacgaccaaaaataatgataattgcgccattaaattctccccttttcacattcaacacaagaattatacaaaaaatacgtcttaattcccattatttatggtttaagacgtatttttctaattaatatcgctagctaaaacatattgtgtagcatttaaagcataatacttttgacctttaattgtaatcttgctgccatatgtcatgacccgactacccttcttgaccaaattacctttttcaattcgacctgaacgagtccgcaaatatgtattcttcttaacagttctagcagtagcatcaatattagtagctactacgtattcgttctttccaatttgatagtacttcttattactgattatcttgtagcctaaaacggttaccggactaccagctaacttcaagatcttggtcttcttgccgttcttgtcataaacataagcatcgtgacctaaagttaccgcaccttgaacttctgctggtacttcgtccttaatcttatttggatccttagtatcagtattttcattcttcttttgcaagtcatagtaatactcgatcaaagaataaaactgatccatgtcgtaatcccacttggcaaaataactatcagggtcaacgtggtctgttccacctaagaaggtgctaaccgccttgtgtgaccaaattgtgccttcaccatcatcgcaagcattgtctggctttaaattgtaacgatgaagcaacttggcaatataaattgcatcattattaactgacttagcaaaggcatcacgactatcttcttcacaaagctcaatttgaataaagcgattgttggcattcggtcctgcgccccaagtaccattattaggtgaatacatttggatgacttgcttactatctacaaaagcattgacgtaagcgttgatatttttccactcgcggttaaagtagattgcttcatcgtgagcagtagctccgggatcgtcagtctcatgaacgacaattccttctggcttgccattttgatactcaacaccagggaatttattgtacttaatcccctctagtttgagcatcttgtataaataggtgacaccactatattgatatttcttcgctaaagtattaatcgaagcggctttgacctggttactgaccgatgatacgccgactaaccccaaaagcgcaattaaggcaattaaaaatttgcgtatcttcacaacaaagccctttccttaattacatgaagttcgatttcttaacgtattgacgaatacctaccttatagtatttcttaccattgatagttatagcactgccgtaagtagcaatttggctattcttcttgtgcttcaaattgttatcgcgattgccatattgattgtaaacataagcattcttcttcaagaatctgaggctaccatcaatattaccagctgcaatgtattcattttcaccgacacggtagtaggtcttacccttgatggtcttggtaccataagtattgatccacttaccaccgttttcatcactggtcttgtacatcttgccctttagcttcttaccattttggtcataaacataggcattatgcatcaagttcttagaaacagctggcacattcttaggtgcctgagttactggttccttagttgcggaactgctcttgtccaaaactgagccattaacccaaccgcgaccatcaatatacattctgcttgaaccatcatggaaagtaatagtcttggtaactactactttttcaccagctttaacagagccaataacactggcaacagatggagcagttggccaattataagttgaactatccttgccagcagtataagttctagtagtattaacggttactggatcatacttagtcaaattagaactagtaatatgactatttaatgccttatcatacttagagtctgtagcatacgtaccggtcaaagccttggttgcagctgcataagttgatgcattttcaatccaagtgcccttataacgcaacggatcccaagaaacaccatttctcaacttactcccattatcttcaaatgattgttcaaaagatgggtattttctaaacttagcagtaatatagtagctcttaccgtttttatcttcttctctagtcttggcagtataagtctcacctgtccaagaatcatcagccttcatcccaaaaaggttattagcattcacggctaatcctgactttccccagcctgactcagttattgcctgggcaatcatcactgatggcaaagttccatattttttagctgctttaactgcctgcttggcagccttgtttaaaaatgcagtttgatcagcggtagcggcagaaactcgttggcttgaggcttgattcatcatcgtagtatttactgctggcacagctacagaagtaagcattgcggcagcagcaaaactggtcaaaagtctcttcttcataaaaaattatcctccttaatataacacctccattgtatctatcaaattaggtctagacaagcgtttcaacagatttgtcgtaaaaaagtaacatttgtaataatattatttaacttatataaattttttaataagttaacttcagcatagatgaaggtagtggattacctatactaagttcatttctaaacatatcaaacagctcttcgggagaagattcatctaaattatgtcctgagtgaactagtatccaatatacctttgtagatttgaaaactttagttgccttttatcttcccaaattagtattctgtgtaattaactcgattgtgttatcagtcataaagtcaataaaactttgttgttcttcgtctattggtttagcttttaactcagaattaaacattctgtacaaaataatagggtgcgcattttcgatattacgcttcgctagccataagaacgcatatgtatctgacttttgaaaatcttgttccgcttctttacgcgatttccccatattttctacgatcaagtccactgttttatcagttaattcttgaattttagttttatcctttttatttaacatagttatcacctacatatcttaattttgacaatatataagtacgcaaaaaatgtcgatttctttttcacaaaattacttctttagattttctttaccttattattttacaagcatcccttaacaaaaccaaaaatgacactctaaatcatcaaatcgcatcgtactcttttttcataaaagtatctgcgcagcggacaaaaaccacccaaccgaccccaagcaaataagaggacagaaaccaccctttcattgcttgaaaaaaatcgagtacacaatatacgtgcttcaggcgtgtcgcctgtacgcatgctgatccttcaacaatgactactacctcatgagagttataaactcatggatcttgctttgaagaattttgtacattataggctccctacatgctgaacctatggcctattacattttttatatttcaaggaggaaaagaccacatgaagaaaaatttaagaattgttagcgctgctgctgctgctttattagctgttgctcctgttgctcctgtcgctgcttcagctgtttctgttaacgctgctgcaaccactaccaacactgttgcacctgcttctactgtttcagctgctacttctcaagaagttactgaccttggtacattaagaggcaccattgttcttgaccgtgcttcaaatactcaattcagtatcaaattgagcgatgctcaaaaggatgctatcttacaattaggtggcgatgcattaaaggatgctaagccagaagatatgaagaatattactgttaagtcagcatctgcttcaaactcaaatggtgaattccaacaagttgttacattcactgttaatgacagagcttaccaagttactttaaatgctaagttcgctagccaacaaggtactccttacttctacaacaaggatactaacactgttgtaaacgatggtagcactgtttcattaaacgaaattgctaacggctttagttcatcagatcttttgaatgctattcaaaagcactatgcttggaagaccagtgatcaatcaaatgacactattaatatgactactaccgcttcagatgtagaaagtcaattagtagctcaaggcttgaagcgtgcttcaaacggtaactttgattatccagcaaacggtttcaaccttaagttgactgctaagtcagaaaatggtaattcaactacaattactgtaagaattaatgcatcagtaaactacaatgcacctgcatttgtatttgacggcaacgtttactacaatgacaacgttatgtcaaatggtaaaacttcaggtaacttagtacttaaggacactgacaagaccaaagttattgtaaatggtaaatttaacaacgatgctgtaactggtgctgttaaagcttacgtacaaagtgcctatggtactggcttcgacaagactccagcagaattagctgctcaccaacaattgatcaactcaagcaatattaagattgactcaagcaaggttaacccaagtgttgcaggtttgtacccagtaactattactgctactaatccagctggctttacttcaaagcttactgtttacgcaattgtaatgggtcctactgaaaaggcaccacaagaatacgtaaaggctgataatactaaagtttacaacattaacggtaatgttgtttcagaagctgctaatattccagctcttgcaaagggcgcagctgtttacacattcggtaaggtaactgttaacggtgttgaatacactcgtatcaacaaggacggctcaaacgaattcgttaagagttcagacttaactgctactaagccagatactactgttgctagccaaagcaagactattatgcacaacgccttctactacaacaaggacggcaagcatgttgatactgacaagaagttgactcgttacaactcagtaactgtttcacctaagaccactaccatcaacggcaagtcttactacgaagtagttggaaacggcaagctttcaggcaagttcatcaacgcagacaacattgatggtactgaacgtactttgaagcacaacgcatacgtttacaagacttcaaagaagcgtgctaataaggttgttcttaagaagggtgacaaggttgttacctacggtggctcttacaagttcaagaacggtaagcgatactacaagatcggtaacaacactgaaaagacttacgtaaaggcttcaaacttttaattaagtctgtggtatacgctgacaaataagaaaggcagagcgaaagctctgtctttttttggaggaaataataatgaaaaagaattttaaatttactaacgcgtggtgctagttaaatcgttctagacaatatgccatattataagctaaaatagctatttctagccgttgttgaaaacctactaagctcctggctcgattattctcagcattgtaatagctaagcaaagaaaagtcgctttcgattgttcttctaattgccattaactgatgatcattatgctttttagcacccctcatgtttttacgatatggtgtccaaagcacgtatcccatacgctttagcttggctgctaagtcttttcctaaatagccttcatctcctaaaagataatggttaattggatgagcattgatcatcaattctaccgtctcttttgcatcatgtaccgacgccttagtaactgcgtagtcaagcagatagccatcatcactcactattgcgtggactttgaagccataatagtagatttttttcgtcgctttataaccaatatcggctatgccacggaagatcttaacgtgataattgcgaacaggctgacaaactggaatcggaaaactgtcgataatcaataattctccacctacctttacttcctgattccaaccctgacggatacaacgaattagaggcaagagcattcgagctcgacggttaaaacgagaatgagataagccaacgaagaatttacagaatcttcgttgagattcaattccaatttcagtttgccaaatgagcatcgctaagatagaactatcaggaagcttggtctgatcaacatttttacgatgtttaagtccatcaggcgcataaagcttatacagcgagcgacaaatcacatttaaccgattaaaactaacttgtaaatggtgagaaaaacgattaagcttgagatagttcaattagatcagactcttttctatttaaattacttacaacttgagtctagtctaattggacttttttattaactaaaacgatttaactagcaccacgcgtatttactagtattgtagcggcggctttgttcgctgcatcgcctgtagtttcattggtagctgccccaaatactattcaagcagctgcagttgtaactaaaagtagtgttgtcactcactatcttcgtgatagaagtgtatacacaaacagcactagaattagtgcttctacctcaattaataacatccatttgactaataatactggtactgaaattgaaacaaacgatgcagttttaaacaatggtaaatatactttaaatgcacaagtaacaataatgggtttgacgccaacttcaactgatcgttcagttactattgttaataacaatggtgaaattattggttctgctagtgttaatgcacacagtactcttgcacaaggtaatcttgaatttgattttgcggtcaagaatggtcgattaagtcatactagtttgggtaatattactggaaatactatgcaagaagaaagttaccaagaagaaacataataaagtagctcataagaagaatcacaaaaaggcacataagaaaactgtcaaacatactaaaaagagaaaataatttaaaacgaggcaattgcctcgtttttcttttgctcttaaaaattaagctaatagttatcttagactacgactagagctaacgagttgcattcgttaacttttttatcattatgatacaggtgcaatataaaaatatttaaaccatttaaggttattcgagaggttttagttaatgcattgattcattatgattatcagattcaaggctctgaggtaaacttcaatatgttcgatgatcgaatgaaaattatattgcctgatagcatgattaacgagaatagaatttaggataataatttactctacgagaaggaacgaaataatctctgacatttttggtagactacacttcaggataagaagaggtcatttcaagataatataattaaaagatggaaaatagaaaaagccatttcagcaaaaatgtgactgaaatggcttttttactcttctaacaaccaatcaagcagtatttaacttgaataccatcaattgttccaacatcaaattatccatttttcaatttgagaaccataattagcatagatactgttttttttataaaacataaaattgggggaactttttcttttgctctaaaaaaggcatcgctgttgcgacacctttgaaagataattttactgtagattattgattactgtttactgataaacttcatgtactagtttgataatttcatcatggctaagcatatcgccgtaattgtttgtgagttcttgtaaggcagtgtctttagtaccacccattcgtttaatgactaggactagcttcttagcatcttctatttttactttcctagcgacttcattcatttcatattccaacttgtccatatcttcgacccactttccgctattcacgtaatggtcgacatccttttgcaagctggcgatgtaaccttcagggtgattgatgattccattcatgtaatccaagaagtcaattatcttttggttcaggtcatgattattgcccttagaattgaaaactttaacgtgcgtaccagtctgaaattcaattcttcttattgctcatgacgtgaccaaagaccaaatcgtcagtgcttctcggatatcgactttttattttaatcatattttacctcatttcaattattgcttcagcaaaattaccctctactacttattacgcaaaaagtaggtaaaattttttatgaaattaaattttgttacaaaatgaacttattgttccatcacattacgtaatttacctaaaagctgctttttcaatcgtttcaacgtaatacgcggtataccgcattctttaactagctgcgtaattgtctttttctcaagcaaatgctcaaaaagaattacttgctcaagttgacttagtttgttaacttcatcctttaaagctacaagattatcccatgcctctgttttacctaagtcataagcctcgtcaattgcagtattgcgttcacatacgcgttgctctcggcgcagagcatcgattgtttgccaaagaacctttttgaagctaagcttatcaatctcactgcgaaccttttgcccatctaatttgcgcaacatctcggcatacaaaattacaccttcttgcaacagatcttcatagagatgatagtccggtcgaacatgtgccgcctttaaggcaccaccaactaacttacgatttttccatgcttcttcgaaatatttttgacttgtcattgtgacactctcctaaatgatgtcacaagcgcttgtgcactattagattagcaagattggatctgcaaaaaaacttagtggtgagatgctctaatcccaagtgtcgcatgtgtttgttaatttctacgataagcaaagtcaagtcagatagtacctgacgaagaacagatgatagtcaaaaaagtgcaaaaaaatacagctcatgagagctgttaacgattatatctgatcttaataatctgcttagtaaaaaagcggtgttcacggtgcaaataatctaatggcttaaattctttcacaatcgtaagtaggtgtaagttcaaaacatgattgtagaatttgtctgccagctttttaaaactatcaatagcgtacaagtccagttgcacataatagttagaattatgcaggattgaatcagaattaatggctgttacgcgaagattattttcttgcaacatatgctgataatataagtcagaataataatgattatgaaacagatactgaccaattatcttcgtaagattgggcttaggagaatcaaaagcaaaattataaaccaagccgttttcatcaagtgcaatactgttgaaaatagcttgatcatggcgtttgacgtggaagtctttaatccagtgcaagcaaatccagtccgtgaagaagtttccactaaatgcatgcattgaaaaataaagcacattgtacatgacaatcccttgatagatatcaactccagcctcgcgagctagcattctctgccaaatcatatcgcaatgtacggcatgccgcatcaatccttgcatcatggcatgtgttgacttctgactaagcacaattccacgattcaggtcgaaggctactgccttatatttgcctaagataggattttgcttgaactcatagactgccaatgtgttcttattgagtcgatatttattgtcatacttgatgtattgctctaattgcgagtcattctcaattctccgcttggtaaggtccttggaccaattacgatattttatgtcagtgggcaagctaataatccccaagttacgttgcttgtaggctgacacatccatcacactccctatgtttgaatatatctatattgtttcaaatattgaatagtattatacagtatgaagcattgattgtatagctagaaattattatgctgaaaaaaacaattttataaaaaattttgccgattttttgtgtaataaataatagagggtacattttatcctactattttttagaaagaggtgcgcaatgaaaaatacgcacaaacaaaaagaattatggtttggtttttcagaagataaggtttttggcgaaatcatgtccaatccagctttctgcaagcatgttttgcaaggaattctgccggagatcctaattaagaagatctttccgcctaagaagcaagaagtaatcatcgatcctgagcatcgggatcaaaaagatgtccgactcgatattttggttgaggatattaacggcaacctttacaatattgagatgcagcggtcagacgatgacgatattgcccgtcgcatgcgctattatgcttcgaaaaacgatcaaaggtatactctccaccagggctatacttacaataatttgaaaaatgtcttcattatttttctttgcacgttcaaaattaagcaaaaagttgcaatcaagtctacataccaaactattaatgtagacaatcatgcagatatattgcaggatggcttgactaaaattataattaattcaaacggagttcctgatggaaccgagactgaaacattacttaatttagtcaaactcatgaaagatttaccggtacatggcgataaactctttgataaggcacaaaaacgcatcgaatcaatgaatgccgatccagaatggagggacactattatggattttgaaactagaatgcttgaacgcgagcaagttggtgaaaagaaaggtcgtatggaaggcgagaagaaaggcagaaaagaaggcgaaaagaaaggcctacagcaaggccttaaaacaggtgcacttacattagtcgcttctttgaaagatgtaggctgcactagccaacaaattctgcaacaattaaagcaaaaatatggcaatgtgttctctgataaacagttagaagaatttctgaaacagagctaagttgtaacaacaatattttccaagatgtcgcataagcggcatcttttttagagccaaaacattaatttaaacgtaaatactgcaaacaaaccctgaatatagaaaaatatagaaaaatatgctaacatgtatatataaaagtggaacgacttgcatgtgcgagagttaagacacaaaaaaatcgctactctaatcggacaaatgagtaacgattttttgtttcaccaaattttatagcattaaaactaaatgtattggctgaggctagtgacgcttgtgatgtcttttagagcccaatctataatttttacgccttttgctatgaccattgcctagccgcttgtcaaatagtctctctaagacataagaaactacgttcactaaaagtggcgctaagatagagcctaataaaaagtgaaacaaatctagcatgtgttcacctcccaatgcgagatctgatattggaaggcataaacgtcaacgtttattataacaaatggtttatagagttggatttaaaattagccagtacatggtgacaagctttttgataaggcacaaaaacgcattgaatcaatgaatgccgatccagaatggagggatactattatggacttggaaactagaatgcttgaacgcgagcaagttggtgaaaagaaaggccttaaaacaggtgcacttacattagtcgcttctttgaaagatgttggctgcactagccaacaaatcctgcaacaattaaagcaaaagtatggcaatgtgttctctgataaacagttagaagaatttctgaagcagagctaggttataacaataatattttccgagggtgtcgcaacaagcggtacctttttctagagcaaaaagaaaaacgaggcaaattgcctcgttttatcttatctactacatagacttaattaaaagtttgaagcctttacgtaagtcttttcagtgttgtcaccgatcttgtagtattgcttgccgttcttgaatgtgtaagtaccaccgtaagtaattacttcagtacccttcttcaaggtaaccttgttagcacgcttctttgaagtcttgtaaacgtatgcgttgtgcttcaaagtacgcttagtaccagtaatgttgtctgcgttgatgaacttgccagtagccttaccgttttcgattacttcgtagtaagccttaccgttgatagtagtagtgttcatagcaacagttactgacttgtaacgggtaagcttgtcagtaccaacacgcttagcgttcttgtcgtagaagtaagcgttgtgcataatagtcttgctttggcttggtacagtagtgtccttgccgttagcaacattaacggttacaggtaaagtagcgtcaacaccattaattgatgaagttacctttacattaactgagaatgaagttggagcagcaaaccaaccagcattgtcaactggaatattagcagcctttaaagcagcattaacatcagcaactacagccttttggtctggcatttgtgatacagccttaccatttgaaacttggtaagcagcaaagttctttaagatttcactagcaacagttgaaacgttcaaacgaccgttaacaccagcagttacattaactgaacccttagttacttgtgaaccgtttgaagcgttgtagaagttaataccgctagcatttgaaaggtcaagtgcattaacgtttgaaactttaattgaaataggattctttaaagtaccatcttggctaagttcaacctttttagtgttagcaaagctcttaccctcatcagttgagaactcaacattgctgttctttgagccaagagtgatagtattgtgtgcgttagcaataccaaagttgaatgatacaccctttacaataacagtatataaaccattagcaagcttcccaaaatgaataactggtctatcctttgaatcaataacagaaactttaccattcttagtatctaaagtaccagtgtatgattggccattgtaactagcagtaatgttaccagtaatgctaccgttaatagtttgtccatttacagtagaagctgcaatagcagtaaggttaggtgttacatcaacatcgtattttgcatcagctggagtgttgattgcggtaccatcagcattaattacagtgtatactgtgttggtagtggttgcagcagcgttaacagaaacagctgaagcagcgacaggagcaacaggagcaacagctaataaagcagcagcagcagcgctaacaattcttaaatttttcttcatgtggtcttttcctccttgaaatataaaaaatgtaataggccataggttcagcatgtagggagcctataatgtacaaaattcttcaaagcaagatccatgagtttataactctcatgaggtagtagtcattgttgaaggatcagcatgcgtacaggcgacacgcctgaagcacgtcctattacttaccacgattcatattgtactaacctcttgaaaaaatagcaagttaaattgactataatcttgcttttgtaataattcacctattccctatcccaataccattcacacaaatctaaaataacaaaatgccgtaatcctagacacaacaagaaaaagcgagcatgcgcccgctttactgtttctttactttttcttaaattttacaacgatgtaacaaaatcaattgaaaaagtaatattactatacgatttctgttaaaggtctaagtgtgaactctacatcttgcgatattttctcctgagccttttgaccaagctaattagttggtcaagcaagtccagattagtcttgcttagctgcaggctcaactgcagattctgctgaatcattaaagatatcagtaatagtgcgttcaatgtatgcagctgattgaggagtgtgataatatgcaacaccgtctttctcgaatgcattggcttccgcaatcgtattcatcgcaccgcgtacttgatccgcagttagattatcgactgcatcccccaacgtaatactaattttcttcttttctccgttcaagaaagttaacttcatagtcttagtagttttagccatcattttttctccttatttcctaaatatgttcgttaatttattcagctgctggtacaagacgtgacttctgcactaagtatgcttcatcaagtgagtcttcttgcaaactagcaattgcttgacccaccttttgcaactcatctgccttagcgccagtcttcacgttcttcaaattgcgggtcttttgcccattcttatacttcttgttgccaaatacatattggattgattgttcagttaattcgtaattcatatttttcttctacctcttaataattagttaaaattgagtattttgtaatcaacctgccggccagatgtcttacactataactaacgattcaaagtcaccaattggctcaaattcgttaatattttttctaagataagggagagttgtcttaatatgaagaaattagtcttttggggtgttattgctgcgatgttcatcttaggtggaggtggcgccggtgcttacattagccatgccaacactcaaacgcacaataatacttcctataataattccaataaaaagaacgctgatcctgaccagcaaaaatctaataattctgatgcagattctaacaaagataattctagtcaggatgattctgcaaaatcctcatctgataaggataaagagcagtccaagaagtcagatgatcaatcaagttcttcatcttcttcaagcgatcaccagcaggaacaatcatccagcagccaatccagcgcggcttcctcaagcaacgatcaatcatctgccgtaagttccagctctgctgctgatgataacaagtaagcaatagagtagagggagttttataactcgcccctctcattgcaccggacgtacggttccgtatccggcgctacgtttgtgattatttacgagataaataatattctagcggatcgaccaagcctgggcgatccgctttgcttatgcccaatacttttgggctaagcagaaagttaatgacatgacccgtacttcttttataccaacctaagcgcgtattagctactttatgaatatcttcatcactaaaattgcactttagtgccttgttaatccgcattaagttaatgtatattcgttttggtagtttccattgtttaatgattaccacccgtactttatgacgcagccattgactgaacttaattagaaaatatttcatgtcgccaactctaaagtaattgacccagcctctaactacttgatttatcttagtaaagactagtgatagaggctgagcagctgcttttctgcgacagagaagttctctcatcttgtcataaagcttgattttgcggtcatctcctggctttgcttgccagtattcgccacttttccagaaggtaaagccaagaaagttgctcttggttggtcgtacaactttggttttggttgcgttgacctttaggaatagctttctttctagccatgatgaaattgaattcatcacacgtttggctgatttaccgcttttgacaaagatattgcagtcatcggcatagcggacaaagcgcaggcctctttgttccaattctttatccattttatctaaatagatattggatagaattggtgaaagagggccgccttgtggtacacctagtttattaggcttaacccaaccatcttccattactccagctttaagaaaggctcgaattaaatggagggtggttttgtcatttacttgctctctaattattgaaattaatttatcatgatttaccgtgtcaaagtatttctcaatatccaggtcaacaacccattgatagccttcgtttaaatattccaagacttgttcaatagcgtcatgagcactgcgtccaggtctaaagccatagctatgctcactaaaatgaggatcatagatcttcattaatacttgggcaatagcctgctggattactcggtcaacaaccgtgggtattcctaaaggacgtttcttaccattagctttaggaatgtagactctgcgaacagcttgcggacgatacttcatcttcatgatggcgtcctttatttctacttgatgctttttaaaatagctatcaagctcatcaactgttctcctgtctacaccaggcgctcccttattgattttgactctcctgattgcttccttgagattattttgacttaaaatctgttcaattagttccatctcgtgatatctccatttctacttgtaaatttattcagaattgtcccaattgctttcaccatcaaagagttacgttctctttgtgctaggctatcctcttatccggactgtctgaacattgcttatagcgagatatgctcttacaaacattaggcccttcgctccagtttcattacaaaaccttcagcactactacgacctcagctgacttctcgcgattaacctttttcgaccaggcttacgatcgctgatattaaagcttactcggtttcacctgtccacgagatctctcggggtaagacattcatctttaattttccactgccccctggtttaccgtcttggttttacggttgtcctttggactttaacttgtgctgcagtctcatccaccatttggcctgaccaggtttctgtacgtaggctcggaaaactcgctagccacttccttcacccatagcgtcaccgctaacggcttgtggttcgctacacttggcgacaactacccgtgatctagactttcactagactagacaaatgccatgcccgacacacaacgaaaaaggagccaatttgtggctccttttatttgtgctcactgtattcacagtatatacttaaataataaaacgcgtggtgctagttaaatctttctagacaataagccaaattataagctaaaattgcaatttccaaccggctttgaaagcctatcagactacgtgctcgattgttctcggcattgtaataggtcagaagcgaaaagtcgctttcaattgttctgcgaatagccatcaattgatgatcattgtgctttttagctcctgtcatatttttacgatatggtgtccaaagttcgtaacccatttgttttagctgttgatgcagttctttgcctaaatagccttcgtcgccaagaagatagtaattagatggatgggtattttctatcagttcaactgtctccctggcatcatgaactgatgcctttgttacgacataatcaagaatgtaaccgtcatcgctaacaatggcatgaactttgaaaccatagaagtaaattttcttggtggccttataaccaatgttggcataaccgcgaaaaattttagcacgatagttgcgaattggttggcaaacaggtaccggaaagctgtcaatgatcaagaactgtccattcaggtcaacctttttattcatttcttgccgtatctgataaatcaattgcaatagctgacgtgaacgccgattaaaacgtgagtgtgataaacaattgaaacattcacagaatcttctttgtgattcaattcctgtcttagcttgccagataagtaaagccaaaatcagactgtccgtagttttaatttgatcaatatttcgccgatgagtaaactcagccggtgcatacaaacgataccagtgccgacaaattatcactaaatctttaaaactaacttgtaaatggtggctaaaacgcttaagcttaaggcagttcaatcagatcaggctcttttctattattatacaagttgagtctaacaagattggacttttttattaactaaaacgatttaactagcaccacgcgtataataaaatatttttagcataaggagggcttattatggtagtcaaggctagaaaacaaggaaattcaatagtgcttaccattccaagtactatcaaagttccacttaatacagaattctctgttgatgtaaataaaaacggtgatattgtatacaaaagaattgctaaaaacaattatgatttatggtcagaccccgcttatgacgattatgattatgatactgaaataaagcgagaataccaagaattaggatacaatcctagagaagtcaaacctgtcggaaaggaactagcaaatgagaaggattgatgtccatcaaggtgacataataatgatcgatgctgaaccacatgctggtcacgaaatgggtggacatgattctgaaaaaggaaatattcgtagacgctatttagtagtgagcagacatgcttacactaaaaagtctggattagtaataggactagcaattactcataaccatattacagatgatccatttagattctatgtgctagattatgctagtcacacaaatggagatgcattattatttcaaatgctatcgtatgatttcattgcccgtcatggaaaaataatcggccacataaaagaatcaacagaattcgataatttactccaacaagtaagaaatattttttcaaaagaataattacttaaattatcatccatcaaccaatccagcgcggcttcctcaagcaacgatcaatcatctgccgtaagttccagctctgctgctgatgataacaagtaaaaaaatagccgttactcacattgagcagcggctattttcattagacctaggcttctttcatcatttgttcaatttgatcccgggaaacagaatcatggtagtcttctgtcagatcctccaaagttttggaatctgatacaccatagctccggttacgataaataattttcttaattgcacttaaaattcctttttcttcaccgtattcacgctcttcagctagcttagtctcatagtccataatagtatccctccaaactggatctgcgttcatttctgtgattttctgccgaattttttcaataaattctagccccagttaagctcatcatactttgcttgaatgaaatctctaaacaaaggtaaggtaaagccgacctttcccctaattattggcttaattagatcatatttaattaattttgcacgatagctattaacatactgcttacttttttgcatagtcctaataattgaactaatactattatcttgcgccatagcgtacaaaaattgaaaatccacatccgttaattcatgagcaattacatcatacgcttggttgaaaagtacatcacggaatctaagtttagtatattccaaagctttttcaaacgtcatcttttgacttaaattttcatacatcaaatctccgatcaattgaaatgcataagcatagccttttgacatatctgccaaaatttctgcttgcttagctgttatgtctaatacatccatgtaagttctggcaattgacgacgcaaatagtttagagacgtgaaatctatccgcccgaaccaagaaggttaaattatgtgtgcctgatagttccgccacttcacttaatagtccggtcataatcactgaaacttgatagttatttaggctccagtcgttgaattcctcagccaatttttgaattgtgggtgtatttgacacttcatcaatacaaaatgcaacacgaatccccactttgttcaaagctttaagaatcttgttaatttctactttataatatatttcatcatgcttttcatttgcttcagtgaaatctactgatacaaaaggaactttaatagaaattgatggcgtccattttttgattttatctagcataggcactagcttgatatacatcattcgaaaaagatcatcagaattgtgcaaagtgactaccatagtatctttatatttttttagttctttacccactttgttcataaaaactgtttttcctgaacctcgtacccctgtaataaagagagaataagttggatgtttcttgagacgatgggctctttgagcaaatttaactgcatcatcattaaaatcaagatatagctctgggatcccgccaaattcagcatcaaaaggattttcattatacatatttttcctcattttacttcattttactttttacatttatattttacttcattttactccattttactaatcaaaactgacttctatacttttgcatctctcaaccacttctatttgcttttatttgtagaagtctgtaaaattattattgactttgtatctatttatttataaataaaggggtaacaactttgactgaagaagaaaagaacgctcaagctcaagctgataaagaaaatgaagaaaacgacgactttaaagtcgtaatgccagaagctaacaagactactatgccacaggaagaattcaaagaacaacctgattacttaaaggtcttcgctaacttctacatcgctgaattcgatgaagacgatcttgaagttatcaacctttacgatgaaaatcataacatggttgatatcaatcgctatgttttaaacaacatccacttcccacgcaagaagttggttgatcatgtgttacaataccacgactacaactttaaggacttgcttaaggccatggaagaaaagactggtgttaagccagaagaaatgcttacttatgaagcatgggaaaaatgggacgaagaccaacgtactaagattccttcatcactttcataatttatatcaaaaaggctccctgtatgggagcttttttactgcatattttttattataatgcattaactttatcatcaccaaattctagattcaatttctgacaaatctcacttgcattgtccagcgaaatagacgaaaataggtacaataagggaaaatgtcatcgtggcattttctttttttattaaaactacaattttgttgtgggagataacgagataatgaataataaagctaaacgcatgagcgcggccggcttactaatcgccatcggtattgtttacggcgatatcggtactagtccgctttatgttatgaaatcaattgtcgaaggcaacggcggcattggtaatgtaaatcgtgactttatcattggatcaatttcattggttctttggactgtaacgctactaactaccttacaaaccgtaattattgccctcaaggcaactaaccacggagaaggtgggatttttgccttatacacattggttagaaaacgagctaaatggttagttctaccagcgctaattggtggagccgctattttggccgatggtactttaactccagcagttacagttacaactgcgattgaaggactgaaaggactgaactttggcggcaatgtacccgtttctactcaaaacatggttattgccatcactgtagtcattctgctagttctgttttctatccaaaaaatgggaactagtatcattggtaaagccttcggcccaatcatgttcctttggttcacttttttgggtgtaatgggcgtaatgaacatggtcggtgactggtcaatcttgcaagcaatcaatccaatttacgctattagattattagtcagtccatataataaggctggaatttttattttagggtcaattttcctagctacgactggtgccgaagccttatattcagacgttggtcacgttggtaaaagcaatattattggttcttggccatttgtttttgtttgcttgtcactcaactactttggtcaaggcgtttggattttgaacaacccaacttaccgtcctgcagacggcggtgtgctcaatccattctttgaaatgatcccagctaacatcagattgtttgccatcattttggctactattgctgctgttattgcttctcaggccctaattaccggttcattcactttagttgcagaagcttcaggcttgaagttcttgccaagaatgaacatcaactacccatctaacgaaaaaggacaaatttatattccttccattaacaagggtatctgtgttgctactatcgcaatcgtcttatatttccaaacttcagctcacatggaagcagcttatggtctgtccattacaatttcaatgttaatgactaccatcctgctttatgaatggttagtaatgaagaaagtcaacactgtttggaactggatcttcttgatcttcttcggtgtccttgacatcatgtttatgatttcaagtttgactaaatttactcatggtggttacgtttcactcttcatcgctggtgctatcggcttcataatgtatgtttggtattacggcaacaaggttcgtgacaagcgtgaagctcgcaatgcttacgttcgcttagatgaatataccgacatgttaacgaacttaagtcacgatgaaaattacccaacttatgctaccaacttggtttacatggccaacgttaagtacaataagttcatcaaacgtgaaatcctgtactcaattttggataaaagacctaaacgagcaaaggcttactggtttgtcactgtcaatgttactaacgagccatttaccgctgaatatgctgttaacacttacggtacgaagaacgtaattaacattcagctctacctcggctttaagaagcaaactagtgtgaatgtctacattcgtcagatcgttcatgacttgatcgccgacggtacgattgagccacaaccacaggaatacaccaccagcccaggtcgtgacgtaggtgacttctcattcgttattgttaacgacgtcatcagtccacaaacacaattggttggctatgaaaaatggcttgtggaagcgcgggttcgcttgcaaaacttgtcttctaacccagcttcctggttcggcttagaatacgccgataccgtaatcgagcgtgtaccattaatcctgggtcgaccaaatccatcttacattaagcggattaagccaaaggattactcgacagctaaaactaaataattactaaactaaaaagtgtctgggaaaaaactagcttccagatgaataaaaacgatcaagatttccttttttaagaatcttgatcgtttttttgttctctttaaaatttttaacaataaaaatcggcccttcagccaccttctttgacaatatttgttcaaattcatcatcataaaggcaattccgatatcggtttcgaccttctctttacctcgcaggtgcgttctgcgcatgccaaatacgttcttcaaatgtccgaaaactggctctacatcatattttctcatgccatagatgtgtctgccttcttcgctttggagaacttcttttgctttttcttttaaatattgccagttaggattatagcgaacttggcgctggcggccgctagctgttttagccaattgttccaattctggcgttagctggaactcgtctgcctcataaaccttaaaatcacggacctgaccagtagaacgatccttgcgctggctgtaatatttgaaattgaatctgacgccatgatgatcaatgtaataatcatctttttcattgtagtaccagttgattagcttagttggatcattcttatactttttggtctgttctttttcatacatagtgtagggaataaagtacttcttgtctggatatttttcctccagcatcgaataattgtattcactgccatagccagcatcggcgacgattttgtcaaacttgtccaacacggtcatttgatccaaaaccggctccaaagttttgaaatctgtcggattaggaaagatggcataatcaactacatattgatcggtcgtgactgcttgaatattgtagccaggctttaattgaccatttttcatgtggtcttccttcatatgcataaaggtggcgtcatgatctgttttggaataactgttgcgtccggcaaagatctcttcggcttcttcatatttttgcattcttggcacataatcttttcttagccggtgcagaatcttttttagtccacgtcgcttggcttttcgaggtgaaccgccaggaatggctttgttttcctgctcaatctctttagtcagcttgttaatttctgcttcagtttcttgagctaattcctttagcccctgactagtttgaactttttctttttccatttctttgactacttctttagtaatcaattcatcataaagttcaactgcctggcctttcagcttttcatgatacttttcaaccgctttgcgccagacaaatgtatagcggttagcatcagcttcaatcttagtaccatcgataaaagcagcaccttcattgattaagccttcatcttctaacaggttagtgaagtagataaagctctttttaatcagttcattggcatggctgcttgatctaaaattattgatagtatgatatgaaatcttttgctggtcagccaagatcatcattggcagattttcttccagcatcaactcaatctttctgccagaaaaaactcttctggagtaagcaaaaagcagtattttgagcatcatggctggatgataggctgggcggcccgttttagcagtcttgcctactaaaacatcttctggaattgaatctacaaaccagctgatgacattagccaaatgattggccggaatggcaaaatctagattaagtgttaaagcagtttgacctgtgatataattcttgtacatgttagtttccaccttttttattttgtgatgatttaataatatcaaggctggagctaaaagtatacaaaaagagcgttgaaacaaaaattcaacgttcttttttcatgatctgagacttagttttttcccagacactttttagtgcaaaaaatttattaatgggtaataagttataaagggctgcagtgtagtagcagcactgtagtcattcttgttataggagcttatatgtaatttagctaatttttcatactcgatattaagaaaagttacttaccaaattactactctcttttcaggagcaagccacatgccatcgttttcggtcacatcaaatgccttatagaattcttcttggcattgtgattgcacgttagcacgttctggacctggtgcgtgaacgtcgatagatacttgcgtcttaattgattctggcaattgcttagttgtccaaacacgagcaaagttttcaaacaattcttgcattgccttcttgtcgccaccttcacccttgttagcttcaacagcagcagtcaaaccaccttgatcggcaatgttttctgatacgatttgcttaccgttcaaggttacagggccatattcaataccatcaaacaagtcgatttcagcttgcgttctcttcttgaattcagcaaaatcttcatcagtccaccaattcttcatgttaccaaactcatcgaattgagcaccgttattgtcaaaggcatgtgatacttcgtgtgcaataacaacgccgattccaccataattagtagcacgactttgtttcaagtcatagaatggtttttgcaaaattgcagctgggaaagttaaatcatttctttgtgggtcgtaacatgcattaaccatatcacctggcatcaaccataccgtacggtcaacatcttggtacaatttctcaagattgtacttaatttgttcccgaccaaattgcacttcattttcataaaggctagcagttggatcaacttgtaaacggtcatagatttcttcaatcttgtctggataaccgatcttcaagatcaaagcgcgcaacttaacgattgccttatccttagttgcttgagaaagccatgaattttcacgaattctcttttcataaacatcaagcatcttgtgaatcatatcagtcacgtctgctttagcttctgcgccaaagtaagtttgaccatagtagacacctactacttcgccgaagtcaccattagtaatatgatatgcctgcttaacgccacttgaaagctcaggttggcctgacaaagcttgactaaatggaaaggcagcttcacggaaatcttgtgacaagctgtaagctacgccattaataaacttaaccagcatccaagccttaatttcagcaaagttttcttcattcaacaattcttccgcgtgatctaagtaacgtggttcagttgaaattatccgttctggcttcttggtaaataatccgcccaagaagtaatccatcttgaaggaatcgaattttgcttcaaagtcagtcaatgaaactggattataagttgctgggtaatctgcccattcttcagttgacttaacaaccttagcaatcttagcgtcatacttaattgccaagtcagcgtaatcttctgcgtccttttcatcaagtccggccattgttaacaacttaatagattgctttttcaaaacatccaataacttctcagcagctggagtcttgtaagtagtcgtatctggcaagaaagtacttggaccaccaaaattcaatgagtgaatcttagtattcttcatatctgcttcaacactgaaagcaaatggaacggcaaaaccattcttgtaaaaatctgctgccttcaagttaaagtcagcgaagttgcgcaagtctaaaatttcgtgcaaatctgcctgaataggtgcggcaccatccgcatttcgcttgtcaaagtttttagcaaccttgtaaagctcaactgccttcttgaagttaggcacagtaggcagttccttcttaccagcagcaaaatctgcaaagtcttgcatcaagttcttttcaatattaagatcgatcccatcaaatgaactggttcttgaacgatcagatggaattttagccttttccaaccattctgagttaacggccaaatataaattatcttgtagacgcgctgaagtattagccttagtaatgtcaccagcaccgccgcgtacgttaaaatacattaaattacctccctagtggaaaaatttttcatataaagacatgatagcattataaaaaaattaacgctatcatgttgtttttattttcccggatttaaaattgaagtgcaacactaagtgttaaacaaaaaggccatgaagacctaaacttgaagtgacgaaaaatcaagaaaggaagatcttcatgaccaattcaaattctagcatttctaagcactatcatcaattaaccagcgtacaacgtggacaaattcaagcaatgctggattccggcataacttcccgtactgttatcgctcaagaagttggctgccataagtcgacaatcagtcgcgaaatcaaacgcggaagcgtcctgcaaagagacagcagctatttattgtatgagcactattacgctgatactgcacagatttattatgagaagcgtcgcaaaaactgctatcagcgcaatccattgaagcattatgctgtctttttgagaatgctctccagacgctttaaagctaaatttgatgccaccagcatcgatgagttcgttggtgaattcaaaaggactatgccaggctacccttgtcccagcacaccaaccgtctatcgctatattgatcagggcttgctggacataagcaatattgatctgcctatgaagctcaaaagacgcaggaacaagcgtcatcacagccatggcggtcacgctttgcacaagaagcatcttggcaattccattgaacagcgtcctaaggaggttgaagacagaaaagctccgctgcactgggaaggagatctggttaaaggcgtcagacgcaagaatcagcctgctttaatgactttgactgaaagaaccacacgctttgaagtagttatcaagattcctgactatcgggcaagcacatgccaaaggctgcttcaaaaggagattgacagacatcctgcctggtttaaatcaatcacgtttgacaatggctctgagtttgcggatatgaccaagatcaagggctgccagatttactttgctcacccatattctccatgggaaaggggcaccaatgagaactgcaatggtcttttgcgtcaattcttccctaagggcaagagcatgaaagacaagtcaaaagcttatgttcaacaggcaactgatgccattaaccacaaatatcgccgaatcctccaatatcacacagcagaggaactcttcaagcaatatatctcttcataacctaactgttgcacttaatttgacaattcaggttgtttttattttacaaataattttagttttttctgtagtttcgcatgcattggaataagcatgactaaaagcaaaaagataccaattgcagcaacagcaaagaattgaatatagccgaaatcttcaatgattaaaccaccaaataatggacctagagctcgaccaattgacgatgcagacaaggttaagccttgatacttgcccttactagaatcgggcgacagatcattgacataagttggaatcgacggcattgcggttgcttcgcctaaagttaagataaccatggataaggcgaaatgtgcaaaatctttggcaaaaatcaaagtaacaaaagaaattgcaaacatcaaagtgccaaataaaatttgtctaaataagctcttaaagatagtaaaacgacttaagatagcttgcacgatgacaataattccggcattgatggtccataacaaactatacagatgaaaaggaatgcccaaagaaaccatgtagacagacaagtttgattcccagttcatgtacatcaaccaaattacagcgatcgtaacaaaaaagccaattgacataatcagattgtattttggcatcggctcaaaggccttcttctttgattcgcctttgttagccaaacgctccttgtggaactgaatcattggccgataattaataattgcgttaacgcaaacgccaacgaataaaagaccagcaatgacaaataataaagtcactgaataatcataaagataacctactgctaatgtcccacaaacgaccccaacattttgagcaaagtagatcatattgaagacataacgacctggcttagatttaatactagtagcaatcgagttaatcaatgctccattccagccacccaaaaagccagttaaagtcatccagagccaatataacggccaactatgattcaaagccatgccaaacaagacagccgcatctaaagcagcccccacaatcagcaagacatatggatccatatggtcatagcaccagcctgaaataaatgacccaatcatatttgcaacacagttgaacagcaaaacgacacccactaaagctagtgaaacgccaagatggtcgtgcaggtaaactgaagtaaatggccaaataaagctggaacccaaccacgttagtaattggcctagaagaagccaatgcaatttgatttcatcagctggttgttttccatgtgctgtgcgcattttctctcttcccttctttttaatcattctctcaatctagtctagcaagaattgtgattttttgcacgagggcaaaagaaaaagctgcatcccttactagaacacagcccaacaagttaaatttttttcttttcttcagtccagcttctaatttctgtcacatcttgtgctacctcaagacaacccagatactttccatttttatcacgtactgcataatagcgtaggtataagcagcgcttcatcttgtgtggagtaaagtgaaactcatacttgtcaacttcacctgaatgaaattgcgcaaaaatctttttaattaacggtctacttttagcagtatgacacgagaatacgtcattgccaatagcattgcgcgagtgcggataaatctcagcaccgccgccaaaataagctaccttatcgtgttcatcaataaaggtcaatgcaaatggcaacatatccaaaattgcatttaactgctctaaatttaaccttccttcttcaaaattaatgaggaaggatgaaagattgctaacagaaataggccctgcttcttttttagcttcctttggcttccaattcattggcttgcgaatcagggtatagccaatctgactctcttcgcgtttaacgttgtaccaatcatcttgatcagctacctcgtcaatcatcggaatcataatgctctcctctttaaagatcatctcaagcacttcatgactcgcctttttaattgcctcagccaactgatctttatctggatgctcctcaccagcaatcttgcttgcatccccaattaaatcgcgaatatcatcatcaacgccccacatcacttcgggcggagctgtaatgccatatttattcattaatggaaaaagcgaggtctccttacgtcggtaatgcttatcgattgttgccaaatcactcaattcttttctgattttatccagtgtatcttgacctgcttgatactttttcaaatctggcaagagtgcgtcattaaccaatgatttcagtaccatattttccagcttaatcgtatgcaccgggtgccccggagtagcaaaatcaggatttaccgcattctccttgatattacccttaaagacatcggcatgcacattacacaggtattgaatctctgctgggtttaacccctgcttgattaattcgcgctctgccgctgtaatttcggccacatcaacctgatcgaattcttcttgaaacatcttctttgcggtcgcaaaatcgccgccgttttgaatataatgcaaaattttcaggattgcgtcctgtctttttttatcagtcattgattaccttgtatcctttatcttcaaatgcttttttcactttagccaaatcaagtttcattgcctgagctcccaatggaatggtcatcacacgccccaccgttttaagcaatccaggaattttaattctagtaaaaccacaatcgtacataatttgaacaaagtcagggtattcatctgccattttcttgatcggtactgaaaagtcgataatcttctctttggtggctttctcctgcttaatttgatcatcatggttagttacacctaattgctttttagctgcactagaaagacgctctgtcgtccagacgggataccagaccagcttaatgtcacaagacttaattccagcaactgaaagaacagctttttgaatatgttgttccaaataatcagataaagggcaacccataattgttaaagtcatcttaatggttgccttatctccttcgatatcgatgccataaatcagaccaagatttactacatcaacttgtaattctggatcaatcacttgggtcaaggccgtcatgatttgatcaacttgtttaatatttttttcttccattttttcacctagcaaaaaagtccagaaaatcattccggactttagtttatcttatttttgcaatttatcccagatgacaaccttgcctgccttcatcgactttggcacatcaataattcgttggttactagaacctctgaattgcagggttaaatcctttaaatcattcataaagcggccatcaactagaatatctatcttagacaacatttcctttttatcaggtgtttctttttgcaattcatcccaagtatatccagaccaggaccagatgtccttactgtggccaaattcttttcgaattcggttaataattcttaaacaaacccaagtattcaagaatggctctccgcctagtaaggttaatccctgcacgtatggctggcccaagtctttaataatgcggtcttccaattcttgcgtatatggaaaaccataattaaagttttgggctgctaaattatagcaaccagggcaatcgaacaaacagcctgaaacataaagactacatctaacgccttcaccatcaacaaagttaaatggcttataatccgcaattttatgtttagaataatcctcagtcttccactcttgtggttttggatttttcggcttgcggtgcattctttttaactcacgttggtgatctaactgtggcttatattggtcaggatccacaaacatggtatccccacccatattaaccttgatcaaattactccggatatctggtccttcttgagtgtttttatctttttcaggcattagtactcacctttttttacttcttcttcggtagctaaactatcttccatgccaaagtccatatgcttaacccggtgcacgatttcttcatgacgaccgtgaaccattggccgcttcaatgggttgcccaagtagccacaagttcgcttgacacaatcacaagtagcaggatcatgattaccacacttaggacattcaaaacccttggcagtagacttgaattcaccagcaaaaccgcacttataacatttatcaattggcgtattagttcctagatagcctaccttgtcataagcccaatcccaaactgcctcaagggctgctggattttgcttcaagttagggtactcacaataatggataaaaccacctgcagcataatatggatatggtgcttcaaaagtcaacttttcaaatggggttgggtgcttacgaacatcatagtggaacgaattagtgtagtattccttatcagtgatgtccttcaccttgccaaactttgccgtatcgagccggcagaagcgatcagttagactttcactaggagttgagtacaaactgtaatgccaatgatatgggtcctctttttcccacttagcacacaagtcatgcattttcttcacgatctcaattgtaaaatcatgtgcttcttcattgtgttcccaatcagggccataaaagactgtccctacttcgtacaaaccgatgtagcctaacgaaatcgtagctcgaccatttttgaaaagctcgttaacatcatcacctggcttaagtcgtttaccaaagacgccatattgatacataattggcgcattttcgggcttagcttgaattgcacgtctacccttaaaggctaaagcttggtggcaagtccgcattctagtattgaagatttcccagaataacttcttatcgccatgactctccatggcaattcttggcaagttaacagttacaacacccaagttcattctgcccgagttaacttccttaccattttcatccttccagccttgtaagaatgaacgacagcccattggaaccttgaaagaacctgtaattttcttgatcgtatcatacattaaaacgtctggatacatccgcttagttgaacattgaatagccagttgtttaacatcgtagttagggtcccctggatgtaagttcaagcccttcttaatggtgaaaactaatttagggaaaattgcggttctgcgttctctacccaatcctttaattctgatacgcaagatatctttttgaatttctttttcaatccaagaagtacctaaaccaaaacctaaagtagtaaatggcgtttgcccttggctagagaacatggtattaatctcatattccaagccttgcatggcatcgtaaatgtccttcttagtttgactcttagcatattcttccagcttttcaggatcatcaatgaacttgccagcatcctttaaatgcttttggtagtttttctctgcaaaaggagctaacacttcatcagctcgatcaaaagaacagccaccatattgactagaagctacattagtaataatttgcgtaacttgatgtgtagccacattgattgagttaggactagtcatataggcatttccaatcttgaaaccattagttagcatatccttaaagtcaatcaaacagcagttagtcattggtgaaagtggtgtgtaatccaagtcatgccagtgaatatcaccgcgcaagtgggctttagcaatgtgctcaggcatcatggtcaaaccaactgttttaccaacggtcccggcagttaaatcacgttgagtactgaagacctcactatctttgttggcattctcgttaacaatcgttgggtcaccattaaccattcgctttaaccgtgcacgagtatcggtttgtttaatccattcctcttcatcgtgcttgcggtattgcacataagctttagcttcatccaaataacccaactcatttaggctatctctaaaagcaactgctacatcttgtgcatttacttcatcagcagcatctagtttagccacaattttttcaattacagcaggtgctacattatctaaatctaggttatgcaaaaccatgttgagtttaaaaattgcgaacggatactttgacccatcacgtttaacaaaagttttaggcgtattaaattttgttacattttgttggttaaattcttcttttagcatttcaatcactccaaatctcgtgtctttatcatagcataaaacacaacatcttgtattgtgttcaaatatagatgaatatatcttgtattaaccaaaagaccattaaattgggaaatgattcagctaaaattttttagaaaaaaagagaggcattttttacctctcaatttaaactatttgtttaattttttattttcttcgtcaaagatcttacccttattaacttcatagtaagtcttgtaacgtttgaagtagttatggaacatgtacttcatcaataaccagcgcttgaagtttctatccttgtcataaaagacagtagtaccatagcggccctcacgaataagttcgtcagcagtcgtcttatagtcgttgtcataagcataattattgaatatcttcttaggcacgcctaaccaaagcttgtatttagattcaagcttattaccataaactgtttccttatctttcaaggcatcttcaacatagtcatcaatgtaccatttagccaagttgtaaccgttcaaagttacgtagaagctagaacgtccctgacgtaagttgatttcgaagaacttgaattcaccatcacgtggatcatatttgatatcaaagttggccataccagtgtagttcaacttttcaaggaattgttgtacttcttcgtacaatttttcattgtactcaggcaaaatcgccatgtaattaccaattgattgtggggttgggtcttccaataatgggtgccctaaacacatcatttttacttggtggttcttatcaacataagcattcaaggtccgcatgttagaatcatcaccaggaataaagtcttgcaaaataaggtcagcgttgtagccatgagtataaatcttagttacgatatccttaaattcagccttatcttgaatggcaaaagtcttcttccgaccttcaaattgacacttcaaccatgaaactggatcttccggctttaattccactgggaaatcaaatgggacatcctcgtacttacctgacttgtagtcatccatcgtaatgatcttagtcttaggataaggcaagccatattcttccgcaatttcataaaagccttccttagagattaatttttcaagtaagtcatattttatgtaaggaacgataaagacctttttcaattcatcttggtgcttagaaagcaactcagcatagccatcaccacaagcaatcaagataactggctcctcgtgattcttgtattcttccatctttttgtgcatcacgtccataaaagtaggatcgctactaaagccatgatgcaattcaacgtccacaatgcttgaataacgagtagcagcaagttgaacgtcagctaaggccttcactttaatgccatatgcttcattaaatgaacgtgccataccatacacgttgatatcactaccgagtaagatcggcgtaaattttttactcatcctcaaaaaatctccctagaattatagtaatttaccctgtgaaattagcttagcaacttcaggttgcacgtgttgatatttcttaactgtgttttcgtaatcaacaaagaacaacttgtaccaaacaaggaaggtatagatagcccagatttgacgtctatgtgagccatcaccttcatagttgtcgtcaagtaacttgataatcttcttttggtcaaaaatatcgttgacaaattcttcttcaaaaagagcatgaacttgtttgtaaaaacgtggttccttcaaccattgcttaattggagttgggaagccaagcttaggtctcttagcccactcatctggtaaaactttttctgaagccttacgcaaagcatacttggtatcatgacggttaaccaagtacttggttgggatagagttagccaattccgcaatcttcttgtcgaggtaaggaacacgaacttcaagtgaatgggccatcgaaatcttatcagctttttgttcaatatcgttaagcataaagtggtgcaagtcaatgtattgcatctgcttaacattatcgactccctttactttcttaaagtctttttggtaaatgccgttaacagtcaatttattgcgatacgttggctgtaaaatgctattagcatctttagaagtaaagatagttgggtaatccatgtcatagataaccgattgaccgacataaaattcactcggttcagctaaattggtgtacatgtgaactttacctgggaaattaggcattctcttaatcttgtgtgccaatttaacccgcttcttctcaggcaactttttcaattctgaagtaaagaccttaataatgtcgttatgcgtatgcatcccgtagttcacataaccagcaaacaattcatcagcgccttcacctgaaagagcaacagtaacatgcttacgagctagtttacacaagtaccagagtggaatgattgacggattagcatctggttcatccatgtggtattgcatttctgggaagtcacgcattgcttcatcagcatcaaccttatcgctgaagaacttccagtgattaatatctgctaatgccttagccttagaagcttcatcataagttgaatcatcaaaacttactgagaaaacgtcatctgggttaagcaaactagtcaagtatgaagagtcgattccttctgataagaaagcaccaaccttaacatcagcgtttctatacaaatcaaccgtttctttcaaatcttcgttgatcttttgcaaagtttcttcaaaggaaaggctattttctttatattcagcatcccaatattgatgggtcttcatttcaccatctttgtattcaaaccaatggcccgctgggaagcggtaaacgcccttaaagaaggtttcttctaggtcattgtattgattcatcaagtatggcttaactgcttcaacatttaattcccgcttgaactttggaaattccaaaaagctctttaattctgaaccaaccaacaaatggccattttgattactgtagtacattggcttaatgccaaagaagtcacgtgcaccataaagggtcttgttgttgtcatcccaaattaagaaggcgaacatcccacgtacacgcttaagcaagccatccatgccccattcttcataaccatgaagtaagacttctgtatcagccttagtagtaaaatcatggcctgctttaattaattcttctcttaatggcttaaagttataaatttcaccattaaaaataattgctctagttttatcttcattataaataggttggctacccccacgaagatcaataattgataatcttctaaaaccaagggcaacctcgtcattagtataatacccgtcggaactaggtccgcggtgtttaatcgtggccatcattttgccaatgacagcctgcttttcatttatctttggatcataaaacgcgacaattccgcacataatttaaattcccctaagtcaattctctaaatcttaatatttgctataatattcactattttttactttaacctttttattataagctaaacacttgtaatagccaaatacctttactattccttaactaaatgaaatacacccggcgtctagaagctgcaccatagccaaaggattgaatgcggtgtcgttttaaatcgacgttcacaatataacccgcaaattcattattttgatcaattcttcggtctaagtttttgttgtatttagttgttagcgaatgatttggccccatcaaggcagaacagttaaacaaaatatattgaatcccgttgatccgatactggtcttcacgatgccgatgtccgcagaagtaggcaataattctcgcattcttgatattggtaaaatcaaaatcatttgataaacgaaattctgttggaacaccattgctagcgtgcattcgacctttttcacgttgattaaaggcaactagcagttcatgcaaagagcggccattatacttaagtgcattagacccctttcgattaattgggttggcatgggacatgaagatgatctttttgttggaagaattagccaaaatttcgataatttcctcaatttgatcttcacgcacagccaatacaatcttattgtcatagcgcttttgcccgcggttatttaattcatatggaacatctgacgtattaactgaaatcacccgcacgtcatctaaatcaaagtatgccaccccgtgctggcgcgaaacataatgaattcctcgttgccggtacatatcgggccacataatattttcgaattcattttctggaaatgaggcttttaaatcatgatgttcatcaaacttatcattttcatcatgattacccttgatactcaaatatggcacctgatccgacttaaaagacttgttcagcttgaccaattcactttcactgaccaggccagcatcggagccatcgatccagtcacctaagtggacttttaaatctagcaagccagattgatctaaataagaaaattcttgcacatgttgcagcccattaaagccataaaaatcgctgctatctttatctttaaagtgagtatctgtaattacaccgatattgaccgaattagtgcctgggcgaatatgctttttcacttccgtagtgaaattatccaagtaattttccacccaataacggcgccctgtcttcttattatgaaaggcacgaaaatgacctagttccgcattatacttgcgtaaatattccggtgctaatttcgttgtactctctggactaagtgcttgtcgcaaaacgccgtcttcgtcttgataaacggttaaaacatagtccttaccatgcggcgtaccatcaacggcaccaacatgatattctccaacagtagtatatttttgcatcggatcaagcaattcactatctttatccattgcagagcgttttttggcgccaacgattcgatcaactattccctttatgtgtttaaacaaattcatcttttcgcctcaaaaaagccggccgcttaccagccgactcaaataatttatgcgttgtgtgctaaagcatatgcggcaagtccaattgataatacagcatctttagacaatacttcttgcaagtccttagctgcaattgcttgaaccgcaccaataactttcaagctgtaaacaatttcacgataatcagtagttggatcgtataaatcatcttcatatggattctcatgattgtaggtcaagttgatctcgtccttatcaacaaaaccatcaacatggttagttaaaatgcgatcatgcaaatcagtcaacttactgtccatcttgatcaaagttagtttgtgatcgctttcagcttcataatattgttcttcagtcatgtcgaagtaatccttgattgggttatttaaaacgcccaagttatcgattactttgtaaacagcttcagcgccaaagtcttgttcgccatttaaaattttatcttgtgataaggctaaatcatcagccaacatcatggtatctaatttttccataggatcctcctcgaaattcacacctaattatagcaaaaaaagctgttaaaacccttatttcgcacataaaaatataatttctcaaaaaataatcgcatttttttgcgtaataaataatagaggggtaaaacattacttacatagaaagagagaaaaatatgaatcaagaaattattcgctgtccatggggcgatacaaaagacgaagcagtacaggagtatcacgatcatgaatggtgcaaacttaatctagatgagtcacatttgtatgaaatgcttgtgctcgaacttttccaatcaggtttaagctggtccacagttttgcataaacgcaacaattttaaagctgcattcaaaaattggcagatctctgaagtcgcaaagatgaccgataaagatatcgagtcattaatgcaaaacaagggcattatccgtaatcgaatgaaaattaatgctgctgttaaaaatgctcgggcatttttggcaattgaacaaaaatattgttcagtcgccaaatatttacaaaattttgtacctactccaattgtgcatgatattgccagctttgatgacgttcccgcttctaatgacctatcgcagaagatatccaaacaaatgaaaaaagatggtttttcctttgtgggacctgtagtcatttattcctacttgcagggaatcggattaattaatgatcatcttaatcaatgccaatttaaatttcacggctaacaaaaaagcggggacttttcgtccaatgtcattaagttaagacattgactaatctgatgacactttttgagacatttatcgaattattttattcgataaatgtcttttttgatagcacaaataagccatcttaagatagtcgtttaaattagttcaagctgctagacgataaggaaagccaactactaatttaacttttagatttcgtttatcttttcttcctggtcgaataggcgttaaataaaatgccacatccagcagtaattgtgtgaagtttttatctgaattatcacttatactaaaatatcgtcgccagatacaacaggccattttaaaatctatttgatattgatattttccctgagtatacggttttgagctcgcaattattgataaactcacggcattatacattgcaaaatgggcgtatatttccatataaacaaattgatcttttttagaatgaaactgtatgccgcttaagtcatatttaagctccctaaaagaagtttctattccccagcgaagatgatagatctctttcattctagctagaggatattcatttcgatataaattggtgatgaggacttcccactcatcgtctgaacctggtggattgattctaaacttacaaactctaaatctaacatcacacatatcctcaaaatcccagcgttgatctctggtattttttgaacgaacagctttatagtgatgctttttgtgaagaatcaggtgaagaaacttttctgtatctttatgggtgacataataataatgtgacgaagttactctgcatgataagtcaatatcgtattcatgattcgacatagctacaatttctttaaaagcaccatctccggattttgatcgcataacatagtggcaatgttttaatcgattgcaattttcaattaaattaaagctaatatagccacgatccatcaggactaagaaatctttttcttgttgggctaatttctttaacatagttaaggctgcctcacgttcatccattttttgtctgggttggataaccatgtctaaatacttaaacttcccacacgcaaaattgcttgtttcattgtgattctgcgtgttttgacaaatataaaaggcacaagtccttttcattgctataattatattgaccaaaacataatttatttgcatgaaaggcttgtgccaatgtctattttaccatctcctgaccaacaaaatgaacaactattttcaaactcaatcatcagcttcatcaagaagtttcaggtgatcaagctgttgagaaaatgtggcttccgcaaggaaaaaggcattagcctgttcagcttgtttctttacgttttaagcaatgtctttcgtgaccgcagcttatatatgcagctgaaaatggatcattttcaagaaaatttttccaagaactcatattaccgttttatgcgcaacgttcacgtcaattggctccacttcaccacacttctgtctgcgcaaatcattaataaccacttgcgatctttgacttcagaaaaacgggctgattgctttgttgtcgatgattcctacttctctaggaccggcttcaagaaaacagaattagtcgccaaagtttttgaccatgtatcaatgacttacaagaaaggttttcgcatgatgaccctgggctggactgatggagcttctttcatgccaatcaattcagtgctgctgtcttctcagaagctacagaatatgattggcgaaaataaagtttttgatcagcgcaccattgctggccaaagacgtatgcttgcccggactaaaggcacagacgtgatggttaatttaatcgaccaagctatgaaagcaggtcatcaagccaagtacgtgctgtttgacagctggttctcaaatccacatcaaatcgtccagctcaagcaaaggaagctggatgtgattgccatggttaaggttagctccaaaatcaaatatgaatttgagggagaacgcaaaaacatcaaacagatttatcgcagctgtaaaaagcgatgcggccgttctcgctacctgctgtcaatcccagtcaaagtcggacgccaggacaaagacggtgctaaaatagatgcacggattgtctgcgttagaaaccgtgccaatcgcaaggattggctggcaatcatttgtaccgacatgtcgcttagcgaagatgaaattatccgcaactacggcaagcgttgggatattgagttttttttcaaaacttgcaaaagttatctaaaactaagtacggaatatcatggcctgtcttacgatgctttgaccgctcatgttgccatagtttttactcgctacatgcttatgtcagttgccaagcgggacgatgaagatgaacgcacgctaggcgagctgttctattgcatgattgatgagctggcggacattacttttagccattccttgcaattgattactgatgcaatgctggccagcgtaaagcaagtctttcatgccagtgaagcacaaatagctgaattcacggctgactttatcaatcgtttacccaaatacatgcaaaaattgttaaagaaaactagcaaaaataatatagaagcctaaagccaagcaagatcaagagattactggcttatttagtgtgggaagtttaagttactacttgttttcaaagtcaggctttacggattcatgtacggaactggcagaacaagtggggtgcaagttgattagttttgatgaaatgtaatatcatttttcctattatttttatctgttgtgatcggagtaagtactggtgtttaaaaaaggcgataatgttgtgttaattctaaagcctaatggcaatcttgaaatgaaaaaagaaaaaactaatttttgggacgaagtatcaaaaatgtctgctaaagaaaaaagattgcagattgaagatttgggatatgatccattagaacaaagatcaaaaggtagagaaagaattgaggattaaaagttagaaaaggttcttggaatcttttttgatgaatttaggtaatctgaaaaaagaaacggcaccgctagataattagcgatgtcgttttagttatgcttagctatattagtatgtctgcttaatttatttaataaactgcgccgtcgtagaagttgtaacgagggcggttgaagtcgaagtcttttaattcactgatcttaattgcgttatcgcaaacaccccagctcattaagttgattggcttaccgtaatctccatcaggaattaccaacaagatgtacttgccttttgaaagggcatagccaagttccattcccagaccaacatcttcttcttcaggcaagtaaacgccaagcatgatgtcgctggacttaatccctactaagtcgttatggtaggtagctgatgcccattcaatgtcgtgcaagtattcagggtgttcatcaacgcggatacccttatattgattatcaagaggtacgtagctgttttctaagtcaacggtaggattttgctttagagcttccattgcttctttgtaagccttattttgcttttcgttgaaccaaccggcaccaaagtataaagtttttgtctttgccatatttttctccctttaaaaatgatttaccttaactttaccatcttttgggttgaaaaaaacgtcttgttaacttatggtgaaaatgttaattccacattagtaaggaaaaatccaatgactaatcaaaatctttttgcacctgatgcagtatttatttctaatcaaactaagcaagatttggtttttaaagaagtttacgagcatttacgcgaaagtggctatgttaagggaaactttttacaccatattgtcgaaagagagcataattttccaacgggattggatactgcaacactaggtaaaaatattcctaatattgcgattccacacaccgagggcgagtttgttaacacgagactgattgttccggttgcgctgaaaacgccagtcacttttcataatatgattaatcctagccaagcaattgaagttaaatttttattcatgcttttagataatgacccagatgggcaagctgcattattagctcaagtgatggattttttggctaatacgccagccaacgaattgcgcgaagtttttaattttactgatcctagcgcgatttatgcctttttagagcaaaaatttggtaagaaaaaagaagactagtttttagccttctttttctaatcttcaagataaatattacgcaacttcatgatgtctgcacttgagagcttcattacatcgcgtaggtagttattaataccgccatattcatcgtttagtactttaacagcatggtcaaggtattcactgcggacactctgaatgtcacgaatcgattgcagcacattttcatttttaccattttgacgggcatgttcaaccatactgtcgacgaaatccttggtagtgatgttggttaaaagatagtctttcttaatcgtatttagtggtacgccaagagcagataatgcaagtaatgcaccgaagccggttctatccttgcctgcagtacagtggaaaataacactttcgccatccaccgtattttcaagcaagacatcgaagaacttgcgatatgccttttgtgcaggttcactttcgatcatgtcttcgtaagcataatgcatgtgattgaagccaaaatcagcgtcgtcgtgtgcttgtgtatctaagtcagttaaactcttggatgaattggttaagtcttcactgaaaacaggatcgtaaatgtattctacgccgtctgggacacggtctggttgattatcaacttcttctttactacggaagtcgacatcgtatttaacgccgtaatcagtcaaaaactgcttgtcgaatggtgaaagatcggctaagttaccagttcttaataacttgtgcatcttgattttcttgccagacatagtttcgtagcctccaagttcacggaagttgcgtccactagttactccgattaattgattagttaattttttagtcaaaaaaattctcccctttctgttaatgaatgtcatgaatattattttagcaacaaatcttcaagcaaacaatcaattaaaaagtaacggctttcaaaattatgctaaaataaagggtaagtactagtgcaatttataggagatgaattaacgtgacagataaaacaaaagaaagcattttagttccagttgatggctcagaatcagctgaaagagcctttgacaaggctgtaaaagttggtttgcgtgatggtgctcatgttgatgtattgaacgtaatcgatacgcgtcaatttatgggtgaaatgcaagacactttgatttcaggagataccatttaccaaactcttcaagattctgaagaatacttgaagagtttgaagaaatgggctcacgataacttcggttttgacgatgttgattatcacattcgttatggcagtcctaagcgcattatttcttacgacttcattaaggaccaccacaatactttaattgtgatgggtgctactggtttgaatgcagttgaaagaatgttgatgggttcagttactgaatacgtaaaccaacatgctttagctgatgttttgattgttaaaaccgatatgggaaacaatcctcttaagccaactatgaaaaagaactaatataagaataatcgccaaatgattctaaattcattggcgattatttttttgaaaaaagttgcaaaataccttgatagaacacgaatgtttctggtattattttatcaaatgaacgtgggaacgaaaaaggggagtgaaagataatgtttatgcaatcagaacaatttattgcaaaggatgtgtctttcgctcgtaaagacgttttttctgttcgtttagttattagaaacgtcattaattaggcttaattattgatcgcctttggcgacccgtaattaagtctttttttgtgatgtagagtagtttgttttatcactgtgtatttatgtttatggaggacataatgaaaagatttagaagaatcttggtagcagtagttgcacttcttgtagcagtagttgcaactgcgtgttcaaacaagagtaatagttctaagggtggttataccccaaagtcattaactattcaatttgtaccaagtcaagctgcaactaagttgcaagctcgtgcaaagcctcttgaaaagatgctttcaaagagattgggtatcccagttcacgtttctatgtcaactgactacaacaccgttgtggaagctatgaaatcaaagaaagttgatgtaggttttcttccaccagatggttatgttttagctcacaagcaaggcgcagccgatttgcttttgcaagctgaacgttacggtgttaagcaaccaggtggtaaagcaactaaccaattagtaaagagctatcgtgcagaaatccttgttaagaagggttcaaagatcaagaactggaaagacttaaagggtaagtcaatttcagtacaaaacccaacttcatctgctggatacgtattcccagttgctgaacttaagcaaaagggtttggacgtaactaagagttgtaagttagttactgttactggtcacgaccaagctgttttgaacgtattaaacggcgatactgatgcagccttcgtctttgaagatgcacgtaacatcgttaagaaggacaacccaaagatcatgagtcaagttgttccaatttactttactaagccaattcctaacgacactatctcagtaattccaagtatgtctaagtcattccgtaagaagcttgctaaggcattcatctctgtagctaagtcaaaggaaggtaagaaagttatcgaaagcgtatatagccacgaaggttacgcatacgcaaaagatagtgacttcaacgttatccgtaaatacgacaagatcgttgaatcaactaagaaataataaatttaattaagggagtttgacgattaaatggcagataagccaatgattcaattaaaagatgtttccaagatctacgacaatggtactgtaggtttaaagggcatcaacttaactattaataaaggtgaattcgtagtagttgttggtttgtctggtgctggtaagtcaactttgctacgttcaatcaatcatttgcatgatattacttcaggcgatattttgattgacggcaaatcaattacaagtgctaaaggcaagaatttgcgtaaattacgtcgcgatatcggaatgattttccagaactttaacttggttaagcgttctagtgttttgcgcaatgttttggtaggccgcgtagcttactacccaacttggaagactacttttaacttattcagtaaagaagataaacaaaaggcttatgaagctttacaacaagttgatttggccgataaagtttatgcacgtgctgacgagttatcaggtggtcaacaacaacgtgtagctattgcacgtgtgcttatgcaaaatccaaagatcatcttggctgatgaaccaactgcatcacttgatccacagacttcagtgagagtcatgaatgacttgaagatgcttaatgaaaaatacggcatgaccgtagttgctaacttgcacagtatcgaacttgcacaacaatttggtgaaagagtaatcggtatccgtgctggtcaagtagtttacgatggcaagatgaaagatactcctaagtctgtcttcactaatatttacaatggtggtaacggcagcgaggaggatgaataatgcctgaacaagtaaatcaattgcctaagcgtaagttcaaagtaatgaacttggtttggacaatcatcatgattgcaggactatttatttcaatcaatgttactaacacgcacattagtgtcttgtttgaaaactggaaccaatttgctgacatctttattcaaatgtctcatccagattggagctacttgaacgttgtttggcctaagttgattgaaaccatcaagatggctgtcttgggtacggtaattggatctgttgtcgcatttatctactcattattgattgcccgtaacatcgttaagaacaaggctgtgactggcattcttcgtgtgatcatgaacattgtcagaaccattcctgacttgcttcttggtgcgatcttcgtagctatcgtaggtatcggtccagttgctggtatcttggctttagcagtcttcacctttggtgtggttgttaagttgttctacgaagcaatcgaaacaattgatccaggtccaattgaagctttgactgccgtaggtgcaaacaaattgcaaattatccattacgcagttatgccacaaattatcacttacttcatttcatatgttctatatgcatttgaaatcaacgtcagagcatcaacagtccttggttatatcggtgccggtggtattggtttgaacttgcaacaaactttgcaggtcttcaattacgctcaaactggtacgatcatcatcgttattatcgtagttgttgtcttgatcgactacgtttcatctaagtcacgggaggagttaatgaaataatggatactacaatgaaaaaattacccgctaaacccgttgaccgtaagaaacaagttgcacattggctaattgcaattgccactatcgtaattattgtttggtcatgtactggtattaacttcggtggtattaaagccactgctggtcaaattgccggtgcaatcttctcaggtattttccatcctgactggagctatgtttacaatggctcaggtgaagacttggtctcacaattgtggcaaaccatttgtatcgctttcttaggtacattcatttccgcaattatttcattgccatttgccttctgggcagctcacaccaagcacaagcattggtacacttcaagaatcggtaaaattgttttggcaattatccgttcattccctgaaattgttcttgctttgatgttcatcaaggccgtgggtcctggttctgcagccggtgttttggcattaggtttccactcagttggtatgcttgccaagttgttctcggaagctattgaaaacttggaagaagggccaaacgaagctgttattgcagccggtggttctaagttccacgtaatcatgttttcaactatgcctaacttgatgccagctttgatttctaacaccttgtatcgttttgatgtttccattcgttccgcatctatccttggtttggtaggtgccggtggtatcggttatccattgattattgctttgcaatatcgtcaatgggaccgtgttggtatcattttgctagggatcatcattatggtggtgatcatcgactggatttctggttggatcagaaagaagttagtctaattcccaaaatttgaatattaaagaaagcgaagacgaaaagtcaatgtcattaagttaagacattgacattatatcgacagcttttaaagatcgaatcattttgattcggtcttttttctttttaaaataaaaagtgagcagagtttatttgcctttctgctcactttcgtcatattatctggtctttcatagaaagctgtgcctcttatgaaatcccttcactcaaatattttaaagctgatggatagtattatcaataaaatcgctgacaacattcacgatttctctgtatctgatcaagcttttactcgctgtcgtaagctcaattccactgatttgattaagttaattcttaacatgggagctggcagcctgaattcggaaatttttcatgcttttcctgacataaattctagaatgactgcttcggcttttgaacaacaaaaggctaaattaaagcctgaatgctttaaagaaattatgttagaacttagccgggcaaataatgtactgcaattattagataatcaatacttagttgttgcgattgatggctctgattttgatcaaccttttaatcccgaatcagaaaatatttttcgaggtaaagatggtcgaatatactgtcaacttcatgtaaatgctctttatgatgtcttgaataaattatatttacttaaacttcccacactaaataagccagtaatctcttgatcttgcttggctttaggcttctatattatttttgctagttttctttaacaatttttgcatgtatttgggtaaacgattgataaagtcagccgtgaattcagctatttgtgcttcactggcatgaaagacttgctttacgctggccagcattgcatcagtaatcaattgcaaggaatggctaaaagtaatgtccgccagctcatcaatcatgcaatagaacagctcgcctagcgtgcgttcatcttcatcgtcccgcttggcaactgacataagcatgtagcgagtaaaaactatggcaacatgagcggtcaaagcatcgtaagacaggccatgatattccgtacttagttttagataacttttgcaagttttgaaaaaaacctcaatatcccaacgcttgccgtagttgcggataatttcatcttcgctaagcgacatgtcggtacaaatgattgccagccaatccttgcgattggcacggtttctaacgcagacaatccgtgcatctattttagcaccgtctttgtcctggcgtccgactttgactgggattgacagcaggtagcgagaacggccgcatcgctttttacagctgcgataaatctgtttgatgtttttgcgttctccctcaaattcatatttgattttggagctaaccttaaccatggcaatcacatccagcttcctttgcttgagctggacgatttgatgtggatttgagaaccagctgtcaaacagcacgtacttggcttgatgacctgctttcatagcttggtcgattaaattaaccatcacgtctgtgcctttagtccgggcaagcatacgtctttggccagcaatggtgcgctgatcaaaaactttattttcgccaatcatattctgtagcttctgagaagacagcagcactgaattgattggcatgaaagaagctccatcagtccagcccagggtcatcatgcgaaaacctttcttgtaagtcattgatacatggtcaaaaactttggcgactaattctgttttcttgaagccggtcctagagaagtaggaatcatcgacaacaaagcaatcagcccgtttttctgaagtcaaagatcgcaagtggttattaatgatttgcgcagacagaagtgtggtgaagtggagccaattgacgtgaacgttgcgcataaaacggtaatatgagttcttggaaaaattttcttgaaaatgatccattttcagctgcatatataagctgcggtcacgaaagacattgcttaaaacgtaaagaaacaagctgaacaggctaatgcctttttccttgcggaagccacattttctcaacagcttgatcacctgaaacttcttgatgaagctgatgattgagtttgaaaatagttgttcattttgttggtcaggagatggtaaaatagacattggcacaagcctttcatgcaaataaattatgttttggtcaatataattatagcaatgaaaaggacttgtgccttttatatttgtcaaaacacgcagaatcacaatgaaacaagcaattttgcgtgtgggaagtttaagtagtaatatcttttagccacgctaattaaattgctctaatttagtaagttctttctttcgtccaataagaaactgtcaaatcttttgtgtaaatagttctttctcgtaaattgattttttaatcatttatttaatcaaaataggattctaaggtatcctgaacctgaccaaagcctttatgaattcggttgaaatagcggtcattgtagctcattgcctggatgccaataaatgcatcaagcgactgttcagttggaaattctgccttaggcttagctttacgcttgatgacgttgttaaaggattcaatcatattggttgaataaattgaagctctgatttgtttgggataattgtagaagaccagcagatcgggctcaatttccttcaaacctttgatgacattgctataagctttattccatctggcatagaatttgtgcaagacagctgcagcttctttttttgcttgtctgttgatgtatctgcttgaattcgttcatgatcttttcgcggtcatccacccggactttagcacagatattgcgcatgacatgaaccaggcagcgttgaaaatgagctttaggataagtcctggccaaggctgttttcatgccaacaacaccatcagaaagaaagagttcaacttgcttcaagcctctggacttcatgttttgaagcatctctgtccagacttcaatgttctcactaggagcaatgcagtagtcaatgacttccttatgtccattaggtttaatgccaatggcaatatatactgcttcacgctcaaacgtttctcggcgcaaaggaaggtatgtcgcatccaaatagacacagaaaaacttgtcgcttagcttgcgcttgtgataagcctcaaccttggggagcatctgcttggaaatatttgatacttgagctggactataatgactgccatacattttctcaatcaagtcagcgatttctctggtagttacgcctttggagtagagcttgataatcgtgctttccaaaacatcagagtgctgcttgtagtcaggcagcgtgtgctgatgaaactgaccgttgcggtctcgaggcacttgcacttcaattggtccaaactgggtatcaaccttgcggaaataagcaccatttctagaattgccagtattccagccatttctggcatagggatcatagcctagaaaggcagttaactcagcttctagcaagttattaacagcctgttgtagctctttgcgcaataaatcatttattttgtctggattgaatagagcttgagcaaaatctttggtaaaatcattcatgaaggagttcttctttctgtatgtgtttttttgttcaaaccaatcatacgagaaaggaactcctttttctaatgtttaaagaaataaatttaaggaattattcatccttacacaaactattttacagtctccatctggcataataaatttctcctaatgtataatacctactttactattattaattgtatactatttgccaaaatttagggtcaaaaaatagccctcaatctaatgaggactatttaaaactagactaacaaattaagccttataacgtgattcaccatttaggtaagtttcacttaaggtcaaatctggattcaaaatcaagaagtcggcatccttatctggtgcgattgtaccgcaattgtccaagatatgggcactcttagcaggaacataactagccatcatcactgccttttctggagtaacgatattccagtcaactacattcttaacggcttgcttcaattgcaagatagatccagccaaattgtcgccatccttaagacgagccatgccatcttttacatagactggcaattcacctaacatgtaatcaccatctggcatcataccggcttccatacaatcagtaatcaaggcaatgtgttcaggaccaaccgcattaatcaaagtcttagccatacatggttgcacatggtggccatcacagattaattcatcggtcacattattaagcgtcattgccgcattagaaattgatggcgtgtggtggcttggatcaggcatcccgttaaaggtatgagtaaacatggttgcacctgcttcaacgcctgcgactgcttcttcaaaactagcgcttgagtggcccaaaacaactactatgccttccttaacggcttcacgaataaattctttggaaccttttctttcaggagccattgaaatcttcttcagcatcccgttagaagcgtccagccacttgttaaattcattaatatcgggatccatcatgtacttaggattttcagctccagcatgttcttccgtgaagaatggtccttcaaagtgaatcccttgaatctttgccccttcttcttgtccttgatggtccgcaaacatcttacaaattctagttaaggtatcgcttgcagcagtgatcgttgttggcatccatgaagtaacccccgcactaagcaagcccttggagatcttattaataccttcccaatcactcttcattacatcctcacgcaatgagccgtgaatgtgggtatcaactaatcctggtgcaacccatttgccagcataatcgacaatcttaccttctggctttttgctttctggatagaaaaagccaaacttgccattatcttgaacttcaagatagccgccgttttctgttctgttttctaagaaaaatttatctgcatgaatgtaataagtcataaatatcttctttctttatatgtctaaatcgtaattgttaatttaattatatctaacaaaattggtaaataccagttcaagcatcgtatttttatcatgctataatgtgcataggaagattgtcgcgtccaatgatcatggatgcatgcgcagtaagacgataacttgcaaacgcgcggtggctctgcataatagcagagctttttttgttgatgcatattagtaaatacaattgcttaagaagttttttgatttttagttataatataaggtagcaagtttaaataggaagaataaatatgacacaaaaccaaatagaaagacatcaactaggccaacttatcggtgccaacaaacgtgatcattattatgaacttcactactccaccggcgatattgttcgtctttatattttagctgacgggatcttcagatattttctcgatccagctaagaagtttgacgagaatcactcatcttttgttgacctgtctcaattcaacaatgactattttgaaaaatcacagcctaaggcaaccagcgattccttaatcattaagtctggcaattatcaacttattttccaacaaaagccagccgtaatgagcatctttgacgagacgctgcaccgcaatcgtttggttcagctgagtccacttgaattaggcaatgatcaaactaccgaaattttgaagcaacacaagaatgaattttactttggtggcgggatgcagaacggctacttcagtcataaaggtgaaatcatttcaatcaagcgcgacaagattaccggtaaaggcggcgttttgacccaagtgccattcttctgggctaactccggctttggtgaattgcgcaatactgagagtgctggcaattatgactttggtaaaagcaatccggatgccactatcttaaagcacgacaccaacatgtttgataccttttatctattaggtaattcacccaaaaatattttggcaaagtattacatgttaacgggtaagccgctgatgccacctaaatatgcactaggattaggtcatgttggcaactttttaactaccttatggcagcctggtaaagctaaggaacgtaatgctgttatgtttgaagacggtaattattacaccagaactaacaagccagaagatgctagtggcaagggctctttgaatggcgaagaagaatatcaattctcagcacgggcaatggttgatcgctaccagaagcagcattttaaattaagttggatcgtgcctaactatgatgtgcaagaaatcaacgaagaagccatggctagcttcagtgaatacgccgctatacatgacgttagcgctggtctttggagtcaaaacaacacaccgaaggcttcacctgataccacctttattcaaacggacacaaccgatccaaaagtattgaaaaatgatgcgctaattttacgcaacaatttgaagcgtaagcggccgttgattttctctaatactggtattgctggtagtcaaaatagaacaatgctagcctttggtgacattggcggcaactgggaaaacattccaacacaagttgctggctttttgggggctagcctttcgggccagcctttagttggtagtgccgttgacggtaccgctggcggtggtaatgctcaaattgccattcgtgattttgaatggaaggcatttaccccaatcctgttcaacttagacgatcaaggtaaatttagtaagaccccatttgcttacaatagtaagatgacgcaaattaatcgagcctatttaaaactacgtgagcaattgcagacttacttatataccctaatctaccgcgctcaagtcggtgagccaatcttgcggccattattcttggaatttccacatgaacaagtcaactacaccccacaggtgggccatgaatttatgttagggcctaacttgttgatttcgccaattgttaacggtcgcgaagatggtaatggcaattcaagaaaagacaacctttacttgcctaaccacagaacaatgtgggttgacttatttgatggcaaaaagtacttgggcggacgcgtttataataagcagtcttacccatcctggcatttaccagtatttgtacgaggcggcgctatttttgacctcggcgaacgcaactatgtcctctaccctcaaggcaagagtaaaatggttacttacgatgataacggctataacgactattcaagaaaccatgtagctacacaaatcacgagtgatttagaagcaagcaaattgacgatcaccatcgacccaactcaaggcgatttcaatactttccaaacggaaaacaccaccaacttgaacatcatgtgtgacggttatcctgatggtttgactgttaaaatcaacgacaaggaaatcccgatgcaggagtacggtaccgttgataccttcgcccatgctaaggaaggcttcttctttaacacaaattacagctggatgcctgaatttgatcaataccaagaaaagaaacaaactgctttacaaattaagttagctaaacgcgatattaccgattctaaaattgagattacgatcagaaacttcagatatggcaatgaaactttggttcacgctattacggattcactgttgcgttcaccaaaacaaccaatggttgatccagacaagattagctctcattcattaacagtagtttggccgcaattaaccgaccaagttcaaatcgaagttaacggcattttacatgatggcattgatggtaattcatttactttccatgaactagtgccaaatacccgctacaccctgcgtttgcgttatgtagctggcaacaaagtttcagaatggtcagatccgtttggcgcaattaccaagcccgatccaatgaactatgcaattaatgacattcatgtcacgagcagtctagctagtcctaaggatcatccaattgattacttgactgatttgaagttagcaagtgaatgggaaaccattgatggggtcagcgaagacaagccacttgaattaaacttcacctttaatcatttggaacacttgagtcgaatgggctgggtacctagaaagattgatcaccaaggcgatcctgttgaagttagtgtcgagctttcaagcgatggcgttaactttaagccatacggcgatcacttgacttggaagtctgatagcaagaataaggttgttggcttaagaaatgtcgatgccaaagctattagattaaaggtttacaagtcatctggaccatttgtagctgctaaggaagttattttctttagagataaaaagtaaatgattctaataaaaaagagttctcgtgcgagaactctttttacttatcttattttctacttttcttcatgcgatgattcttaaccaatgacgaaacccacccgctaagaaaaaatagagaaattagcacaaattgtgcgtcaatcgaataagcaaatagcttaaagctaagaaccagcgtaatgattagccacacgcagtacaccgcttcaaaaggcataatcattcggtcaatttttctattcttgacgatagtgtgatagatattgtcattagggttagaagattttttatgcttcacatcattcgccccactcactctttagccattccattgccaagttgaaccagtgcgccgcgtgcggattatcctgccaatcttgccccttagtttccacattgtgacgagccaatgaaaagccgtggtaaccgtggttaaacaaatgagcttctgctgaatccttattcttattcaaagcaccaatatattcaatcgaatttccgatcaaaaccaccggatcatcccatgcctggaaaataaatgtatcgggcgtttcacgtgtaacacctaatgcactatccaaaatctcttcctctacaggcatttttgctttttgatcttctggaatcggaaaaccaatctttttaatatcaatcagcggatagcctaagattgtcttattaggtaaaacatcagtcttatcaaaatcatactttgtctgataatttttatttaaagccatgttattagctacactgaccacatgaccgccagcagaaaagccaactgttaaaatcttatctttatctaactgatactcatcagcgtggtctctgaaatatttcacagtacttagaacatctaaccccgcatcagggtaaattttgtctggatcttgcactaagttatattccatcaccacactgttgaagccttgattgttaaatgctaaggctacgggttcgccttctcttttggataagtgattaaagctaccacctggtactacaatagctagcgggcgcttttgctcaaccaattcaggattaggctctagcgcatatgtatgaacttgatattcacgattattaaagttagtcagcgtcagactttctactctcatgttttggtcctttcttgctcattcctcttgatagcataaatgatgatagtggcactgttaatataaccccaatcaaagaatacatgataattaacgcttcatttacaaaaagtttttcatttaaaacttcaccaatcgtgtaatgcaagcggaaataccataagaataatgataaaaaactaccgaacatcccaaataaaatcgtgttcattgctgtacccaaaacatcattaccaataaccgtaccagaagccatcaactcttcttcaccgatagcagggttatgcttcttgatttctagcaagcccgaactcattgctaccgcggcttccgcgattgcacccaaagttgagaaaatcgccactgtcacggcaatcatcggataactcaagcccggcatctgcgacaagccaaccaataactctcctgcctctggtcctagtcctgcagcttgagccaggtattgacaacccaaaataaagaggctaataatcaaacacactaagaaggaagaataaaatgaattctttgctaccgtatagtcatgagtgcctaaaaagataatcgtaactagctttaaaggaataaaaatcagcgtcaaaattgcaatgttaattccccatgatattagcatcgccactaagatcaatagaatcgtattaattagcacactaaaaaaactacgaattccagtttcaccaccgacgattgtcattaaaatcgctaagacaacgatcaatgcaaataatgtactcatttattctcaccttcttttttaaacaaactcttccaatcgcgttttttcaagaagaacaaactgcatcctgtcgcaaaaataaccgtcagaacaattccgattgccgaaatcacactttgcgttgcccccagcgacagagtaaagccaaaagttgaagctaaagtattattatcacgcaagtacaaaatagtttctggcagcgcaccagcaataaaaattaagaccaagacattaatcaacggtcccataatttcttgccccatcgttcgaccactatgaatcaactgtctcatcgtaatattctttttagtttgaattaattcatacaaactagaaataatatcggtcgcctcatccattactgcacctaaaattccaatcaaagtctgagctaaaaacaagcctcgtggatcttgcgttgcatagtcaccggtctcatatttcatttccgattcacccgttaacttcatgatcacgtagcacaaggcaaaagaaacaaatactcctagcagcgttgccaaccaagtcgccaacatttttttattcaagccctgcacaatgagcaagctaaagaatgaaaagacgatatcagctaagccaaacagcaaaataatgtgggcgccattcaaatgcacatcccaaatgataatcaaataaaagatcagccacgaaattaccattgacacaaccagcgagagtgagtgcttccctactgcagccaccatcaatgctaaagtgattgtcactaccaaaactaacacccaatcacgcttaggattaacgatcgctggatcacccttcttgatattgacaaaaattctctgacctgcacgatacttttgcgtcgtcaattgcgaaggataatacacgtttttagtcgtgtaagtttcgcccttgtgcttacccgataaaacttttaagtgcaaaatttgctggcgagtttcatccgcatttttatacacatcttcacttttttcaatcaaagtatccttgatcttgctatcggtaatcacggcaacgtcgtccttgtggtaaatatcagtggcaaaataggacaagaccgtcaataatgctcctacaattgtcacgataactgctatcgtatagcgctttttccatttaaatttcattacttctacttcctattaattgttatacgcctactgtaaaacaaaagctggccttttgttaggtcagctcttgattcttaatcaatttgtttaaaacttaaagattttttgccaccagtgttccttttggtccgttaattgcatatcttctagtgtacggtgaacatttgaagtagcccgcttcttggcattttcctttgccttagacataatctcgtcatgcatttgttcttgactcttattcatgtcttttttaacttcagcgcgcttttcttcttcactcttcggtttaggttcatccgcactcacaattccagaaatatctggcaaagccgcaaacttatctaaatcatcttgtggcgcagctaattgcttttgtgcttcaattaaatcttgattttgcttttgaatgacattcaattgcttctgcaaagaattaattgcctcattttgattagaaattgtcttttgcaaagtgttaagcaacttaaccacctgctcagtatccattacatcggtactgttataagcgggcttaggagctggttctttagtttcaggttcaggtttcttttcactaacagcatagatttgaagagcggcttcttgcaaagttaagccactatttttagataaacggtgaaaagcctttaagtcatcaatatctttttgatgatacagacgagccttttgcttagtccgagcaaaatagtcgctcttgccggtcaccttctccacgattaaagaatactttcttaacgtggcaacactaattcctaattcttgtgcagctgcttttggtgcagccaattcttcaaaatcatgcttgttagtcgtcattgaaatctacctctatatttttggcgtttagtcatgcttgtgaagcaaagttttcttatgatcaaaacggtccatacctgcttcgattaagcgtgtaatcaattcgctgtaaggaacacctgcttcttcaaacaacttaggatacatactgatattagtaaagcctggtaaagcgttaacttcagtcaagactaccttgccacctggggtgagcatggagtcaattctagccatgccgctacattcagttgctgcataaactttacgtgcattttctctaacagtatcgataatttcttgtggtaaatctgctgggatttgtaacttagaagttgaattatcatcatacttattttcataagtgtagaatgaaccttttgcattggtgatttgaccaacacctgctacaattggcttgtcgttacctaagacagctgtttcaacctcggtgccaggaacagtttcttcaactaagaccttatcgtcatacttgaaggcttcttttaaggctgcagtatattcgtcagcattagttacgtgactaaccccaactgatgagccttggttagatggcttaacgaacatgtcgcggcccaatttttctgctaccttttcatagttaagtttagcattcttcttgtcgtcgtattcaaaacgcttaattgaaatccaatcagcgactggaacaccaactctttgagccaagatcttagtgaattccttatccattgttacagcggctcctaagacgtcatcaccgacgaatggcttatccatcaagcggaacaaaccttgtaaaacaccgtcttcgcctaagttaccgtgaacaattgggaagaaaacatcaatttctggcaagttttctaattcaattaagttagaaatgttgttaaccttatgtgggttcttaacttggtatgaaggatcatctaaaaccttgaagctttcttcttcattagcaaagtagccttcattagtgatccaaattgggtgcacatcaaacttatctttgtcgattgctttatagatgttgcggcctgaaacaattgatacttcatattctgatgaattaccaccaaaaatcaaaccaacttgtaattttttagtcattattttatacctcttttaaatgttccaatctttaattatacgcaaagaataccagaaaagcgcaaaatagtggaatatttttcactaaagccttttcattggttatagtttataatgaaaggtatactgacaaccatagaagggagtctaaaatgcttctacggaaattttctattgccgctgccgcaactttatttatccccctcgccggacaagttacacaagcagcgacattcacaacacaagaagttaacgaagttcataattttcaaaaggaatatgcgaaccttgataaaactagttatagtgccgcaaatatttatgctaaaaagccaaatctaagcaaaaaatttaaggtaggtcgcttagatccaaaatacattaaaacgcaaacagattatatcaattactatcgatcattgttcagtctgcccgctatctcgactactgatacacttaataaaaacgcgcagattacggctgctgtaatggccgcaattaatgctaacccattcattaaccaacatggtttacctagtgaaactaagccaagcaatatctccaaatttgtttggaagctagctaaagacacttctgaaacttcaaatttaaactttaatgtttcacagcaaaccgctggggatgtgatcactgacttaattactgaccattataatttaactggttcagataccggtcaccgagcttggctactttcaagtcgtttaaccactacaggcattggggcagcttatggtacaaatggctaccgctattccgttcaaaaagtactaaacattaatgatacttttcgtcctgctagtcagccggtagttgcttatcctagcatgcgtcttttccctattgaattgcttcaagggaaaaatatcatgtggtcgctctatttatcagatagaaccattaaaaataagccaacaattactatcactgatttagatactaaagttgttactactgcagctcatgttaagaattacagctcctgtggctacggcaattttagaacgatcctaacttattcacccgcaaatactaacctagttgcaggacatgaatatgaagttgacgttaaaggcgtgcagaagtacagattcaagctatttaagcaagatagtactaatgacactacaaattatcaagttcagcaggatacaaccaacacgccgaccaatcaagcaaccactaatttaaatagcgaaacagatgtgcaatcaccaattttacttcaaaacaagattttacgtgctgtcatcattcccaaagccactgctttgcctaataatcaaaacaccttttttaatgcattaattcaaaaaggatggcatcaaaattttttcgtaagacagtacgtattatcaaaccccatcattacagatgagtaaattaaaaggcccaagcaatgcttgagcctttttgattataaaactttagataagaaatcttttgcacgttcactagtagggtgttcaaacacttcctgtggcgtgcctttttcttgtaaatagccatcagccataaaccagacctcatcggctacttctctagcaaatcccatttcgtgagttacaatcaccattgtcattcccgaattagctaaatcttgcattgttttcaaaacttcgccaaccatttcaggatcaagagcacttgtaggctcatcaaatagcattacttccggatccattgctagggctctagcgatcgccacccgctgctgttgaccacctgataaactagctggaaattgttttgcacgatcggccaagcccaccttttcaagtaagactagtccagtcttctcagcttgagcttcactaacacccttgactttcatcggtgccaacttaatattttcaattacattcatattaggaaaaaggttaaagttctgaaaaaccattcccatcttttcccgcaattgatcaagttccttaccatcctttagactagccaagtctgttccatcaaaaacaattttaccagtcgtaggacgctctaatacattcaggcaacgcaagaaagtactcttacctgacccagatggcccgataatacagataacctggcccttatctacttccgcagaaatatctttcagaacctcatttttgccgaaagttttcttcaaatgttggatatcgatcattttagtcattgtgtttcatccgtctttcgaaataattaagcaatctagttaaagtaaatgtcatgataaagtaaataatcatggcaatgaataaaggtaaaacaccacggtaagtcgaagtctgaatcaattccgtttggtacattaattcagttaccccaataactgaaaccaatgaactgtccttcagcagggtaataaattcgtttcctagtgccggccaaatatttttcaaagcttgaggaataattacatagcggtaagccttagcttgagaaagacctaatgatctagccgcctcagtctgtcctttagctactgaagcaataccagaacgaatgtcttctgcaacgtaagcaccagagttcaacccaattgcgataatccccgctacaacagctgacaggttagaaattaatgctccaacaccaaagtaaacaaataaaatttgcaccatttgtggcgtaccacgaatgaattcgatatagcaaactgcaatccagtgcagcaatttattcttggacaaacgcattaaggctaagagcatccctaagatgatcccgattaacactgagaaaatcgtgatcacgatggtatagccaactcccttaataaagtaaggaatatatttagtcatcgtgttcgtcttctgcgctgtcttcatatacttagctgcttcaggcaagtatttcttattaatcaaatctttttgttcaacgcgattaatagtcttgttcacagcagctactaagtcattttgtcctttagcaattgctactgcgttaccagcttgttgttcacgcaagtcacttctcacagccatcaagctattgtcgttttgttggtaggccttagcagtcatttcttccatgacaatgccagagatcttattagattttaatgccagaactaagttgttgattttgcctaagcctttaaccttagactgtttcatttgcttttgaatcaaagaatactgaatactaccagtttgcgcaccgacagttttaccagcaaaatctttaatttttttgtatttggcctgatcgcgtttgttaattaagaaatattcgccacttggcttgtaataaatcttagaaaaatcaacgctcttctttctctcgggattaggtgtcatagccgaaataaccatgtctaccttgcctgtctctagcgctaccaaaagtgaatcaaagctcatgtttttaataactagctttgcatgtaaatccttggcaatatcttttgccaactcgatatcaacccccacatatttggtattgccattttcactggtagtaaactccagtggcggataatccgctgaggtgcccactactaattctttcgactgcttaatttttttcatcactgagccagtctcaacctccttattggctgcattaacaggctgattaaacaaaaaaagagtcgaaagcatagtaatgaaagcaagaaaagtctttataattttagcttttttcataaactcgcccaattcttttaaaatataaacatatgaaatttgttaattattttttaattataaagaaagatgattctttgtgcaaacaaaaaacgtaatcattctacagattacgttttctcattcttatttagcagctgtaatttgccatggtatcgcacaaatgatgtaaataattaccccagcaattacatattccaaaaagacgctactgccaatctcaagcaaaaagccaaattcgatattatcgacattaaagattactggcacaagtgctaacaagcctgaaatcaaaattagccaaaaacctgcccacatgccagcagccatcgtatcatgaatcaccattcgaattgtagcccgcgacttcatatcgttgagtagcgaaaccattgtaataatggtaacaataattattatcaaattaacgataaacaataaaccagcaatatttgctcctaaagtgatcacacttaaattgaaggctttaataatcgcgtaaggtgcattagttccctgctttttcagtttacggttaacttcctgtgccccacttgacgagcctttagcaattccttgatcgatatcgcttaaaatctgattagccagtggcaaactagtaaccttaaaccaatgaatacccaaagaataatcaataatatggtcggcaattggttgagtttgcgtatccgatagtaagtttgaattatcttcactatctgcattaatcaaatcagctaggctatcataatttttattcacttggcgaacaactactgccctattatagctagtcctaatctgttttttcataaagattggatttaaaaaagtagctgtaatcaatgataatgcagcaatcaaaaagatgacgaaagccaacaaacgtttatattggttattttgctcataacccattcgtcgcaaatcagctcttttgccttcaaccatggcgactcccctttagctgaaaatttccttgccttcatcgaacattgtatcaattgctcggtgaacaacttccatatcagcagtttcaataatttcatgtccttcttttaaggcttgatcaatttcttcagaagaacaatgcaagaaactgaacatcaatgcacttgttgcatagttagcaagagcttcggccgttaaatggtgttttttgcgatcatgatatagacggccaataccactagttacaaacgcaattcctgtctcaagttcgctttcgtcaacgttaatgtcatcaaataaatgattttccttaatccattcattaagcatgattccccaattatctagggtagcattgctaacaaaagcttcagaaataatacggtccaagccctcatcgtgcatccccaagatagcaatcgtataaataaatgccttagttctagcataaggaagattgctattagccatgtcataattattaacttgttgacctaaagtattaaaaagattgcggataatgtcgttagttaacttagccttatgaggatagtatgactgcagtaaggattttgaaatgcctgatttttctgcaatcatttgcaaagaaacattatccattccattttctctgatcagatggaaagtattacctagaataactctccgtctcttcatgtttttccgtcgtgccatagtctattcctctaactttctctttttctttctatacaacacatatcaattatatcaatcattactatttagacatagttttataacttatctacccgattttttgaataaaaaataatcctcatagtgaggatcattttttattcaaattatcaataagaattttactttaaacggttttgttcgtcaaagatttggtggattgaacgatcattgtatacataatcgataccacgagcaagcaattggtctacggaaattctgaccattctgtctgggtagcgcttgtgcttaatggtatcagtaactacgatttgctcaattggtaattcattaagtactccagtagcattcttagaaagaagtgcgtgggttgcggcaacgtaaactttcttagcaccagctgccaaaactgacttagttgatgaagaaatacgtgaacctgtatcaatcaaatcatcaatgatgatacactttttgtccttaacatcaccaatcatgtcgtggacctcagtatcatagcgagcacctctttgatcaacaattgcaatcggtgcattgaagtattgaccaaagttacgagcaagcttagcgcctgagtgatcaggtgagactacaacgatatcatcatcttccttggtagcaattccgttatctaagaagtattgaccaagaagtggaatggcatgtaagtgatcaacagggatattgtagaaaccttgaatttgtgaggcatgtagatcaacagtaattaaacgatccatgccagtcaattgaagcaagttagccactaacttagcggtaattggttcacgtgaacgagtcttggtatctgaacgtgaatatgccaagtatggtacaaccacgttaattatatgagctgatgcacgttgaagtgcgtccaaaacaatttcaagttccataaagttttcgttaactggatcttggatagattgaattacgaaaacatcacaacctctgacagattcaccaatgttaacttggatttcaccatcgctaaagtggtgaaccgcagtttcgatcaatggttggtgtaaaattgccgcaattttttcatttaatgcagggttaccacctaagccaataactttcattgggtgcaataattgatgaagttcttccttgttcattatttacctcttctgaataaaaatcgtatacaccaccattatatacaaaaaggcacctctattgaagagatgtccatgtttgcaatcaattttattgacgctttcttttaaaataaaacaaaataatgccaataatcaatgctaattctggcacgactaaattacttaagctcagatttaaaccgtgcatgaaatatatcaaacaaactgcagcgatcatcaatgaaattgcaatatcctgtagatttactgttcttggcactttggtaattaaactaacagctagcataataattctaacaataattaaaatgcctgcaatgaacattaaaattgatgacgtgctgaaatcttgataaacaggaattgcacctaaaagtaaaacaatcccaaaagtgataaaaactataccggcattgaacagatttaatgtttctaccctattttgaaaaccaaatataacagcaactgcagcaactatcacgttaaccagcaatactatccacattacctacgcgtggtgctagttaaatcgttttagttaataaaaaagtccaatcggattagactcaagttgtaagtaaattaaatagaaaagagtctgatctaattgaactatctcaagcttaatcgtttctctcaccatttacaagttagttttagtcgtttaaatgtaatttgtcgttcactatataatctttatgcgcctgataagcttacgcatcgaaaaaacattgatcaaacaaagctttccgacagctccatcttagcgatgctcatttggcaaactgaaattggaattgaatcccaaagaagattctgtaaattttttgttggcttatctcattctcgctttaatcgtcgagccaagatgcttttgcctttaattcgctgcatccgtcaagcttggaatcaagaggtaaaggttgctggagaatttttaattattgacagttttcctgttccagtttgtcagcctgttcgtaattatcgtgttaagatcttccgtgacatagccgatattggctataaagcaaccaagaaagtctattattatggtttcaaggtgcacgcgctagtaagcgatgatggctatttgcttgactacgcagtcactaaagcatcagtgcatgatgccaaagaaacgacagaattgatgattaatgctcatccaattaaccattatcttttaggcgatgaaggctacttaggaaaagacttagctgccgagttaaaaggtatgggctatgtcctttggacaccatatcgaaaaaacatgaaaggtgctaaaaaacataataatcatcaactgatggcaattagaagaacaattgaaagcgacttttctttgctcagttactataacgctgaaaataaccgagcaaggagcttagctggctttcagcagcggctagaaatagccattttagcttataatatggcatattgcctagaacgatttaactagcaccacgcgtattacctacaaaatcctttaatcaaatccagcagttttaaactgcgcactgcataactgtcatgcgtctgccgtggcataatcaccaaccgcgcattgggcataaattggctataccaacgtacatgctcaaccttaacccagtctttttcacctactacacaaagagttggcgtagtaatcttcttcaagtcatctactgaaataaaggactcagtcaactctacgcggctgtcacgatcaagtctcaaaaagcgatgaaagccttccgttaagtagtgatatggtctaatgcctgcaccattaacgaaaacgccagctacaatcatcttcttaaagatcgttggatgttttctagctagcatcattgccaccagaccacctgcatcaaaaccgaagcaatagcagccttcaatgccaacctgtttaacaaaggcatagacgtcttctacttcggtcttgtagtgttccgcaatgtcgccttcactaaggccgtggccccgcatatcaagcacgtaaacggtgtaataaagagaaagcggagccacaattttatcaaacataccaccatctaagtgatgtccatgtagtaaaagcaaaggctcacctttacctaacttatgataataaatttcgactccattaactttttctttcatgttttcccctattcactatcacgcaaggcctgctgtcgctctaacttcttacgcatcttttcttcctcgcggtctttcatcattgtactgataattttgctccaaacccggtaatttccccggaaattatccgcaacttttttaatattaggctggtgaataatactgccctttctctgccagtagtggtaataaggtttttgcgtgtagtagacgcctttagccacagaaatatatttaacgttaaaaatctgatcttccagtagtgaaatatccctatcaaacttcaaatgatatttcttaataatggcagttttataggccttgttccagctatatcctttcattggtgagctaaagacattagtcaacttcaaataagtttcaccgcgcgttaaatagccaccttctggtcgaccaacaacgcgttgctttttgtcaggataatccatccaatagccacatgatactaagctgacatctggatgactttcaaaagcatgaataaaaaaggatgtgtagcctggatccacccaatcatcaccatcatgaaaggtgacatatggtgtgtcaagatactgcatcccaacattacgtgcatcggatgggccgccatttttctttttaattattttaaaatatggaaaacgattggcatagctttcggctaccttaaccgaattatctgttgagccatcatctactacaagcaatttgaagctcttgtcaacttgattaagcagagcatcaaaagcacgtggcaagtattgcgccgtgttataaacaggcatgatgatggttaacttaggcacttgtaacatattgtccccctttgttgctctttattataccatcttcaataataaggtcgaaattaagaaagttttacgtgttgtttaattcacttttgaaaaatatttagtataatgttccgtattacaagaataaatattcgatcaaaaaggaagaaaagaagaaaaaatgaagaaatttatcacactactcacagcaatgttattaagcgtggtcgcgatgatctcatttactaagccagtattagcagatgatgatacacctgtagttaccttaggtacatcattaactgatgcgcaaaagcaaggcacattaaagaccttaaccgccccactaaacggtggtaattatcaaacaattactgttaccggctcagatctggttaaatatttaaatccctctggtgataatttcaccacttcatccggtgtttggtccagtgcgatgatccaaaagaccagctcaggcagcggaatcaacgttaaaattttagactacgatggtaaaaataatatcacgactattactgccaaccagtacaaaaacgcagccctgaccgccggcatcagcgatgccaacatttatgttactagcgctattccaattgatggttcaggggcattagctggagtttatgctgcctatgctaaaaatggcaatgcattaaatcaaaagcaagttaatgccgctcaagatgaaatgaataccttgtctgggattacccaagataataaaaacaaaaaaggttattcagatgctcaattgaacaatgcggttgccggtgccaagaatgagatggctaaacaagggcaaaacattaccgacagtcaaattcgcgacattgtcaacaatcaaattaatattaaccacttaggtgacaccatcaacaacaatcaaaaaaatcaaattgtcaatcttctaattgaaattcgtgattcaggggcattgaaggacggtaacttcaagcaacaggcttcgaaattatccagtcagattcaaaatggagctaaaaatatcttcaataaatttaatacccaagaaaaccgcaactggttacaaaatttgtgggatcaaatcgttaagttctttagtggtttgttcggcggcgttattttaaattaaaaaaggctacagtgtagccttttttcttacattttttgatccatataacggttcaattcatgatcgacaaattcattaccgcgattattagcgtgacctttcgtccattcaaacgtactatcaggaaattcctttaataaccgatctaattcctgccattccgccacattagccaatggtccagaagaacgtctccaaccacgttttttccagccttgtagccaatgcttattaatcgcattcaacacatactgcgaatcaagaacaaataatagatgtttatcgttaaaaccaagctcaagcagcttttttagtgcattaatcaatgctgtctgctccatcttattgttagtagcaccatattcaccaccggagccatgaactttctggtcatcccattcaattaaataagcccaggctgctttatcggtctttttaacgtgaccgcccttataaacaccagtattgcgcgtgccaccatcagtataagtcaccgcaaagaagtcagcaggattgctattaacatggttatactgcttcgccttttttcgcggtgctttttttatttcttgactcttttgttgcaccctttttacggcgttttgtaaattatcttcacctttttgcaggacatcgctctgagtttgggcattccaatctaagtaatctgtagcatcggtaatttgttcaaatgacttatattctgcaccagagaagccatcaacttgttctttggctgcatcccaagtccgatatattcccggagtacgtccttttttgactgcataaaacttcatttctacctctaaaattccaaaatctttacccaatggtaaaatatacttattgcataacttttattataggaaaaaagaaagagaaggtggtaaaaatgtttttcaacacaaaaaaatatgctgaagaagttgaaaaagatcataaacatgacctccaagaagaacctagcatgtttaacatgatttctttggggctgatggccaccttcgctcccacgcgaattttcctcaaattacacaagcgccatattgaaaataaggcaaacattgaaaaaagcgatctaaaacaagtacccattatttatttccatggctttcgcggcggtgattataccactcgcgtgatggtgaaacacgctacttatgacaagggcaatcccaagtttttaaaggtaaccgttgatttattaggaaatttcaaattagaaggaacttggactagtgacaagcatcctatcgtgcaggttgcttttcgccagcgaatagtcggtatctatggcatcgactattatctcaacttcgtcctgccctttttagctaaaagatatggttttaaaaactatattgcagtcgctcattcattagcctgtccatgtattattcgcactgaaatgaagcactaccgcagcaaaacgttcccacatttaaaaaaatgtgcctttatcgctggtccttttgacggggtcacttacttgggcgatatcccaaacgtcaactatttgaccgaaagtggtcggcctagtgtcatgaacccgcactacctttatttgttttttaatcggcgcaaattcaatcctgatatctcggtcttgaatatttatggcaacgttttagataacacaaatactgataaattcatctctgttgtttccgcaaaaagcattcgctatatcgttgccccaaaagcacatttttatcaagaagtagaagtacgcggtaaagatgacgccgaacatagttggatgcatgacaatccgtttgtaatcgatattattgacaagtttcttaaattaaaaaagtagtttaattttggaggagtttatgatctggtggcatgactttgttagaatcattatcattaccaacacaatcttagccttctacgttgtcttccaccgtagaagatccgtttcaaccacttgggcttggttaatcatcctgttagtattaccagtagtcgggattactctttatgccttctttggtcggggtatttcccaggaaaatatttttgccatcaataagcaaaaacacattggcttgagaaatgttcaaaaatcgattgctaaagcacctaaaaatactagtccttctgacacttcaaaggctggtaatatagcaattaacttttttaaccatcaacaagaagctcccctaactaaaaataatcaggtcaagctctataccgaaggtgaaaccttctttcatgacatgcttaaggacatggtacgagctaaggaaataatcaatgttgagttctacactttttatagcgacaatatcggcaatcgtgttttgcaactattgattaaaaaagcaaaacaaggagttaaagtacgcgtaatttatgatgcctggggttcaatgggagctactaaagcatggttcgatcaattgcgggcagctggcggggaagttttgccttttgtcacttcacgcaacatgatcacccgttaccgcattaactaccacttgcaccgcaagattgttgtcatcgacgggcgaatttcttggactggcggttttaatattggtgatcaatatttaggcaaaaaaaagaagtttggtcattggcgtgatagtcaggtaagaattgttggttctgcctctctgcttttgcaagagcgtttcgtcatggactggaatgcctctatcactaataatcaacagctcatacgtttcaattccactctatttcctgatcttgatgaaaaaaacatccacgaaggcgacgttgcaacgcaaatcatttcagacgggcctgatcgttatgcaccatatatgcgtaacggtatgatgcggctaatgcttttggcacgcaaacggttatggattcaaacaccatacttaatccctgatgatgccgtttttgctacgtggcaaacaattgcctcatcgggtgttgacgtacgaattatgatcccatgtaagccagaccacccctttatttatcgcgccacacagtggtatgccaacgaattaactcgcttgggtgtcaaaatttatatctacgaagatggctttttacatgccaaaacgacgattgtcgacgaccatttttcttcagttggttcaatgaatcaagatttccgttcttacaacttaaactttgaagataatgccgttttttatgataaaaagttcaaccagaaaatggtggcagcttttgaagaagatatgaaacactcgcatttactaactaaggaagaaataaaaaagcaaagtcgcgcattgcggactttgcaggcattctcgcgaatgctttctccaattttgtaattacatcattgattgaacttcgacaggaatttctcgaccagcatattcttgtaattgcttaattacgctattaacttcattattaaagcgcatcatataagccttaccatcgctagttcgaaaaatcgccatcactaatggcttctcttggttggggatctggattaaagtagcgctggctaaatcatcatacttaactgtacgcttgaagtagcctgaaacgaccatccgctttttactaaatcctgaaaaaccatcgacaatactaattaagataaaaagagccaagaagacgctcaggcctggatcacctttttcaatgtaattccatgtaaagcccagccagataaaaattagcgcccaaacaactgaggagatacgatagcgaccacgaaaatcaactttagcttgccaataccaactataacaagcataaactactaataaaatatcaattgctacataaaaatacgtcatatatttcataaaaatcccctcaatttagttattttaatcattatactgaaacttgaaagctaagattaacgctccttccccgcgcctcttggctttttcttatcaaaaataaaaacgcaggctctctctgcgttatactttaagtgtcgacctaaaaagtaaaggagatcctgcgcaatgaacagtatagaacaaatcgacacagaaaatgatactaaatccttaatttcttcatttattaatctaattggtctagctaagttaactaaacaagtcaattttaagcgtaaatccaccgtttcattaaccatgattatctcttggctgatgtcagtacattttgctcggctttctttattcagagctaaggatgacaaacgtttttccgttagaactgctcgcaatgtacttaacgatggaagaatcaactggcaaaaactattatgcttgattgcagcccggctcattggctgcttaaaaccatttatcgataaaagacgccgacttgcttttatcgttgacgatacgctgatggctcggtctttttctaaaaagaccgaattgctagctaaagtctatgaccatgacaagcatgagtatttgaacggatatcgtggtttaactttaggctggagcgatggcaataccttcttgccggttaactttgccttgatgtcaaccaaaaccaagaaaaatatgattggagctgctcccattactgctgatgaacgttcaatttctggtaaaaggagaaatcaagctcagagaaagatgaatgatgtaactgtagagttgattagacaagccttacgattaggagtagaagctaaatacgtcttattcgattcttggttttcttctccaagaatgttttggattttaaagaagatcggtttagatggacttggcatgatcaagaagagttcaaagatttattacatttatcgccatcgccgctatagcgttaaagacttgtatgatcgtttggctgcttcaaacatccgtaaaaagaaacattatctttattcaagcatagttgaggctcaatatcatggacatagctttttattaaagctcgtctttgtctccaaccgtggaaacaagaacaagtatttggttttagctactactcagacaaagcttagccctgaagaaatcatccaactttatggtcgtagatggcaaattgaaacatattttaagacgtctaagcaatatcttgctttagataaatctcaagttcaaagctatgatggccaatgtggctatatcgcagttacagcaataacttatgatctattgacctggcaggaaagacaaaatacagatgataagacaatcggagatttattctatctaatgaacgaatccttacctgatattagattcgtagatgcattggtctacttaatttcagaattaaaagagcttaaacagaatagttttgaaaagatagatgaagtaatcaatgactttattaaccaactgccacgattcatacaaattgcactgaaacagatcatataaaaactaattacgtctaagaaagctcaatagtgacaggacttgagcttgattttggtgctttcaattttcagtcattataacaaaacaatgatttataattaaagtagtgactttcacggagggtgacattatatgatggatttagcagaattacaaacagatattaataatgcccaacatattgtattcttaactggagctggtgtttctacccactcaggtatccctgactaccgctctaaaaacggaatctatgatggcgtgcaagaaagtcccgaaactatactgagcgatagtacgctattcaatcgacctgaatttttccatgaatttgtcatgaacaatatgtactttcctactgctaaaccaaacttaatccatgaaaaaatcgcccatttttgtaatgaaaaaggtaatttaattacccaaaatatcgatactttggatactaaggctggcaatcaacatgtaacagaatttcatggcaatttatataatatttattgtactaaatgtcatcaacctgtttcttatgaagaatatgctaaaagctatttacacaaagattgtggcggaattattcgccccggtattgtgttatacggcgaaggcattgatccgaaagtattaaaccagtccgttgaaataatgcaaaaatcagacttgatcatcatttgtgggacgagttttgtagtttatccttttgcccagctcttggcttatcgcaaagaagacgccaaaatttactctatcaacaagacagaaattcctacccctggtgtcacgcaaataattggggatgcattaacagcattccagaatttgaattaactttcctagtttgttattcttagactaattatttttaataaagatgttacacatgacagagtttttttactatgattacgttacaattgagccatggacctactttttaacagcttcagaagccggcctaacttacgtcggacttaaaggagatgaaactgtttcacctatttttagcttctaccctcaccgcatgttggtgcgggaccctaaaaagatggcacctcatatcaaacaattaaaggaatattttgctggtatcagaaagaattttgatgttcctattgatatttcggaattcggcactgaatttcaacgaaaggtattagccgttgtccagcatattccttatggtgtgacgttaacttatggtgacgtcgccaattcactagccgaagccacatcttctcgctcagttgcacacgccgtagcattaaaccctgttttgatttttattcctgaccaaagagttattttatccaacaataaagttgggacttatcgtctgggacaaaaagaaaaaatcagattaattaaattagaaaagaagcaactacatgtcaattcttaaactatatgcacccttttttgacggcaataactggttacatgtcctaaccagtggcaaagactggatgatcattctgactttaatcttgatggaatgcttgttatcagtcgacaatgctgtcgttttggccgcacagacacaggtgctacctaataaagctgaacaacgcaagtccttggtttatggcttgtggggtgcttatttattccgctttattgttatcggaatcgggacttatctgatcaacttttgggagattaaattagctggtagtatttatcttttttacctagcctttaaattcttctatgatcaacgccaccctaaacaagctgccgaacatgagaaagaaaaagaagagcgcgaagcagctcgccacaaaggcaaaaagaaaaagagacatgtgctatctcttttctggcgtacggttatttcaattgaatcaatggatatcgtcttttcaattgattctgttttagctgctttagccgtgtctgataaccccgttgttgttttaatcggtggcatgatcggcattctctgtatgagaggagttgccgaaattatcattaaattaatggatattattccagaattgcagccaatggcttacttattgataggaatcatcgctttaaaattgctactagctctgccaccattgagatttgagttgccaaacaccgtttttgcaattattgtctttgcgatcttaattttgacaattctcttccacttttggaaagttaaaaaacacggtcacaaacatatttaactgtttagcgtatttaatacatattctttgagtacaactgcttggttgtgctctttatttttggcaccaaataagaaaagaacatcttctttagccaaatgcttctttacatcttgcaaaaattccgctgtataatcattatgattaagttcttcaatatacttttgcttaaacttagggaatttttcatcttcatgattaaaccactgacgcaattccttactagggccaatttgtttatcccattcagctaaatcggccttaactttgctcattccccgtggccataaacggtcaactaaaatccgataaccagcaggttgctcatggtcataaattcgaactaatttaatttctgtcattattttttatctcttttctagaaaggtcaaaaatgaattattcaacttatttttctactaacactaccgattatattgcaaaagacctaattgggcgaatgcttacttttgataatggtcaagaaaaattaggcggctatatcgtggaagcagaagcatatatgggtaaaaaggatcgcgctgcacattcttatggcggtcgtcgtagcccagcgaatgaaggactttacggcaaaggcggaacgatctatatctacgcgcaacgtcaatattttttctttgatgttgccactagggttcagaatgaaccacagggtgttttaatccgtgcaatcgatcccactttaggaattgagaccatgatcaagaaccgtcatggtaaagatggcgttcttttgactaatggtcccgcaaaaatgatgcaagcttttggtattcatgataaaaattggaatttgcactttttatcagactcccctttcgccattgatcttgatgatcgtcataaaaaaattccccaggaaataattgctgcagcgcgtgttggtatcaatcaatctgatcccgtttgggctaacaaaaaattacgtttttatgtagcaggaaatccttatgtttctgatatgaaaaagagaaattatgaaactaataatggttgggcttgacaaatttaactttttcttctagtattcttcattagttaaatatttttccaatgcaatagaggttgcgacaatcacaagttaagtttgagttcgcgaaaacaatgatagttaacttagggttgccgccgaaatagatttaatattcgcgtgttaatctgttgggctatagaacaatattctatagactgtcctggttagttcccagggagcgctataagatttggtttaaacactgatgattatgaccctcgcaattctttggaagagcgaggtttttgtttactctttattgtgttggctttatgttaaaactatttttggaggttttataattgaagtcaagatttagatggatggctgtaataatgtctgtcctactcagtttatttatcggtttttctcttagtagcaatcagactcaagctgctaagaaagattctggcacgttaaaaataggtatggaggcaaactatcctccatacaactggactcagccaaccaaagctaatggagctgttccaattgatgattctaactcctatgctaatggttatgatgttcaaattgccaagatcatcggtaaacgactacacaaaaaagtaatcgtagaaaagactcaatgggatggtctattgccagctttgacatcaggcaaaatcgacttgattattgctggtatgtctcctactgccgaaagacgcaaggcaattaatttctcagaaccttatcgtaaaagtactttcgtcgtaattactaataaggcaagtaaatattctaatgctaagaagttgactgatttcaaaggtgccaagttaaccgcacaacaaggaactttgcactacgatttaatcaagcaattaaaaggtgctaaaagagaaccagctatgcgtgacttttcagccatgcgtcaaagtttagcttctggcaccattgatggttatgttgctgaagatattgaatttgaaagttaccacaacgttaaccctaacattattgcagttaacttaaacaaaatggctggcttcaaagttgaccatgacgattccgtaactagtatcggggttaaaaagggtaataccaagcttttaaatgaagttaacgctactttaagaactatttctaataaaaagcgtgatcaattaatgtcacaagccatcaaggaacaacctaaggctggtaacgaaactaagaaagaaaactggctagttactacttggaagcaatatggtggcatgattatgtcaggtattggcatgaccttgcttttagctttagttggtaccattgttggtttctttatcggcttgcttgtaggaattattcgtaccattcctactccaactactcgcggcaagcgttggactttgaacgtagttaagtggttattatctgtttatgtagaaatcttccgtggtacaccaatgatggttcaagcagccgtaatctactatggtattgcccaattctggcacttgaatttaaatagaactgtagctgctttgattattgtgtcaattaacactggtgcttacttagctgaggttatccgtggtggtattatttcaactccagaaggtcaattcgaagcagctagtgcacttggtatgacccacaaccaaagaatgtggcatatcatcttgcctcaagctattagaaactgtttaccatcaatcaccaacgaatttatcgttaacatcaaggatacttcagtattgagtatcatctcagtttctgaattgttcttcgttggtactactattgccagtcaatcattcaagttcttcccaacttacttaatgatttcagcaatttacttgatcttaacctttactattactagaatcttcaactttatcgaaaagagacttgaaggtaataagaattacaacttgatggctaaccaagtccaagttggtactccaaaagatgcggaggcaaataattaatgactgaatcaaacgaagtaattttaagcttaaagcacatgcaaaagtcttatggaaatcaccaagtattaaaggatatttcctttgacatcaataaaggcgaaatcgtaacgatcattggtccttctggtggtggtaaatcaactactttgcgttgtatcaacctgcttgaagaaccaactggcggcgagatcgattttcacggtaaaaatatcttgcatcccggctataaccgcaatacctttagatcaaaggttggtatggttttccaacagtttgatctattcgaaaataaaaatgttttagaaaactgcatggtcggtcaagaattagtcttgaaacgttctaaagatgaagcacgcaagattgccatgaaaaacctagaaaaggttggcatggatcctttcattaaggctaagccacaacaattatctggtggtcagcagcagcgtgtagctattgcccgtgcgatttcaatgaatccagaagttttattgttcgacgaaccaactagtgcccttgacccagaaatggttggcgaagtactagacgttatgcaaaagcttgctacaaccggtttgacgatggtgatcgttacccacgaaatgggctttgccaagagtatttctgatcgcgtattgttcatcagtgacggtatcattactgaacaaggttcaccggaagaattattcgaccatcctaagaatgaaaagacgcaaaagttcttgagcaactttagaaataatgaattctaatatcaaaaaagccgcgaagtttaattgcttcacggcttttttagcgtataatttataacaaattaatttttggaggaagtaaaatgaatgatagagtatattattttatcaagccttatgacgaaagtctgccactgccgcctgcagaaagttttgcgcaaattttgaacgaggcttatttgcatcccttcaactggaaagcaagaactacgcgtaaatctttctggtggagcactttgattaatcttgttatcggcatcttatgcatccttcttggcttctatgcttttaaccaaaacatcaaccccggcattagaatagtcgatggtattgttgcggctgttgtttatctgtggctatttttagctgcattaggacaaacgatccgacgtttgcacgatgttggctacagcggctattggtactgggctgccttcactggttatggcgcaatgtttttattttatcttgaattgcagccatctgttcaacgccaagttaagtggggcaaatacttgttcagcgatcaagattatcctaagggtggcgcaaaaagtaatgttcctgtaccaactattggtcaaatcttgaaggaacacttctttgactgctttaagtgggatgctagatctactagaacctcattctgggtaggtactgcaattagccaagttatcatgacaatcggcgtatttgcttgttacctacttgctttcatgcttttagctcctttcagcgttactgaatttgattctggcgatgccaaggtaatcggtgtaatcttcatcatttttattattttctttattgcagcagctatttgggcctttttagcacaattaggtcacactgttcgtcgtctgcacgacgcaggctttaacggtggttggtggtggctgggcgtaattccttacgttggtcaactgttgctagcattcttgctcttccaccctactgttcaaaatgaagttaaatgggacaaatatttatttgatccagaagatcgaattagatagataaaaattaaaaagatcattcctatatgggcaatgtcattaagttaagacattgacaaattatcgacttggacttttaagatcattcatttgcgatttatcgcatttgaatgctcttttttcatgccaaataaacccaaatcttgtttagaaattaggctacacgatataaataatatacagctgatttgggtttgagatttcttttgtcttttcgtcctggtctgatcggaattgtgtaatgactaatttgaataagaatctttttaaagatttcagttgaagaagaaattatatacatagcctggatgacaaaacatgactgtttgaaattgatcgcatattgatacttgcattttttttgtggtacatatgcttgagcatcaatttgactgactgcgttaaacataatcatgtgggcatagatctccatttcaataaatctatcctgcttggaatgaaactgtacgctacctaaagcatatttcaactttttgaatgaagtttcaatgccccagcgcaaatggtagatttctttgatcctttttaagggataatcggctctatttagattagttagaacaacttcccattcttctttgcctgatttaggatcattaattctaaatttacaggcacgaaattttattgtacataactctccaaagtcccagctgccatctttggtatttttagaccgatattttatatattgacggtaatgatggttaaccaaatgaacgttttctgtagccttatgggtttcataataataattagaggtagtcacccagcaagctatatccttatcacactcttgattaggcaactcagctacttccttaaatgcgccatatcccgttttagtacgtatgacataataacagttaggcaggcgattacaattttcaatcatgttaaagccggtataacctcgatccatagtaactatatatggtccgcaatttagctttttaagcatttgaacggcggctttacgttcatccatctttgacttaggctgaaagatgcagtcttgataagtattatttaacaggtcatagagtgcattaacatgaatttggcaatatggctttcctttatgattgagatttccaacgatattctctgatttaggattccagatttgattaaaatcagacccatcaatggcaaatatacgatatttatgatcaaataactggatattaaataaattctgattaaatacagttagaatatgcttaaaacatgcgggtgaaagctgacctttgcgttggacataagcggaagtactgactactttatcgttatttttaatagctttttggccaaaagctctaaacaactcactggtcaaatcttttccttgcatattaatagtagttttaatgactgtagctgcatctaaaaaccgcttcctagtgaaggcatgaggatcatcgataaaatcatgaatatgctttccagtatcattgataatttgatcaagacgatctaaaatatttctgtgaagggctttcataattaacaccagctttctggcaataattttgaaggtttaataatttaatcagagggcgaaaaggtaggttcttttcgcctttattttatgcaaaaaaagaaccaaatcataatgattcggttctacagagattagattcaatttgtcaatgtcttaacttaatgacattgcctatatggggatgatctttttaaaactcattttttattttgaattgagtttacaaaaaatagcgcttttttacgttttaaataatatccttattttccttaatgcgagctaatttccagcccgtatcaaaatacgtcttgcgcgtttgacgcaaatcatcataatcactttgtaaactatcaatgtcatcctgtaagctcttattttgctttctaatcgcatttagctcaggatcattgataacacccttaaggtgtacttgagccgctaaatagcgccgacgatgctcaaattcttctctcaaagtacccagcgcatcttcatacttaactagctttttattgatctcagaaatttgatcattcagttgaataaacaacttataaggcatatccgacttaattcggttgcattccgcacaagctaaagttaaattatctaagctgttgttgtgactaagagaaacgggatccttatgatctacgctgtggccacgtctgccgcaatattggcagcggtatttatacttggcccgaatgcgttcacgatcaataaaatcaacttcgtttaactggaaattgatctccaaacccattccctttaaattttgctcaaaagttacgccttggttaggcacataattaagcttgccatcttcgcttttaattaccgccaaattcaaatcagaccttttaatctgttggcgggcgatttcattgccatcataatcttgtaaaaaggcctcgtattttttacggtcctttttatttttcacaataaaacctgattgatcttgtttctttgcaccgacaaacgtgtaaagcaagctttgagcaaaagctgcgaccgcatcatttgcgtaatcttctggattcaggttgcgcgtgatacaaatgtcgcaaatactggtcaacttaggattcattaacccctcttgcttaaaatgcaaagagtccatgcgcagcccgcatgaactacattgaaatttcacctaatcatcccctaacaatagaatgctaaaagctattcgttgcatcttatcctttcccgcgaaatcacctttaaaaagatctggcaaaattttcttaataaagtattgtacgcaaactaaatcgtcgaacttcttgatcgtttcaagactttccttgaacatttgcatataaaccgggttaggattacctaattcgatttctccataagcttcatataacaaatctaatttatcacagattgataaaattttaccctctaaagtatcatctttgccttctgagagacgtttagtataaatttcttgaaattcttctggaatctcatccttaatgaacttagtggtcattgtttcttcaacgtcaccaatcatctttctaagttgaggagtagcgtatttaacaggtgtcttaatatcaccgatgaaacgttcagtataatcgtgattcaagctcttttcatataaagccttccagttgatcttctttttgccctttacctcttcaatatctcccatcatttgtgctaattccgctgttctgaagcagtggtcagctactgagtggtgatgatacttgaagtagcccggtgctcgatcaattgactctaaactgttaaaaccttgaatgtatgcatttaatcccattttttgtcctcctcattttccttaaaatttttactatgttatcaaagattgattttcaatgcaaataaaaagaggcctttgcctcttaaaatctatgcgccggtgtcagtatcgttgccatcgtcgttagtgctgcatcatagtaattatttttaggtaattttttagcaaaaatatattgctgcgaagcaaacaaattatcatagccttgattgcgattttcattcaccgcaatataaattggcgcgctaaagctagctgattgataattattgaccggcttgccttttaaagtatagcctgctgtaattgtattttgcttgctaaaaaatttaagcaagcgatgtacagtattctttgctaatttatccttactaaatgctaaatccattggcacccggcaagcattggcataataatcaccatcatatcgatcagtggtaacccttcctttaactggcttagcatcttttgatgtcagccaggcaaagtctggaactaggccactcttatgctggtgactcaactgattgagccgcttgagcattgtttttttaattaagagccaccgcgaatcattgctttcacgataaaattgatcaaacattgtcggcaatacatctgaagtccgcattaaattataatacttcgacttagaatcggcccaattgcccaccgttaaagcgtgcgttgtcggattatattcataacgcaaaatatcggcaattaatttttgcccttgccgctgatatgctggggttttccatcttttagccgctaaaaacaaagctttagcaataaataagtccccatcagtagcgctattgcgttcactgctccattttccatttttctttgtttgccgccaagccatcaattgcgtattacgatcccggtgttttaaataatactgcactagcttagcaaagttgctttctttaactgctggatcatgcgccgcaataaacatcccatatccttggccttcagataaaaccgtcacttgttcctgcttaggcgtggtattaatataggcaagattcttttcttcaactacataatttttatgccaagaatgtagaaaaaaattacgcaccgctgaattattatctgctctgatatagatcataataccggtaaatgcaatcgttacgagtaaaaatcctagtagcatccatctttttttcatctcatcacctaatccgcaaatctcttagtcttaacccatttagtactatcacgatgaaaaacgcgatctagcattactgaagtaaccgcatgaattgatacaatgatgaacaattgcgaataagtaaaatatgatgctaaggctagccaaatctgttcgtcagttgcctgcccatattgcgtagtcatcgctaggttaatttgcaaaatataaagcaaaaccatcaatagccaattaaagagcagaatttgagctaataaaatattactccgcgaaattgtaaatggtattactactgcaggattccaaagatggacgattaaggcaatcaaattagaaaaaaagatcagatctgataaaacaatcgccaaattaaaccagaaaaaagtgcaggaataatagacagtctctaatttaacccgccagttgcttttatcaaaaagatggcaaaaattattgatcaccacttcatagttacctttagcccaacgcaagcgctggaaataataatcttttaagcgttctggttcttgctggaaggcttcagaattataggctaaggcaatcaaactacctgagcccataattttaaaagaaatatcagtatctttggtcaaagcgccattgcgccagccgccaattgatctgacataatcagtattaataataaagttagtccctggaatacgaccaatcttaaataattgccagataccgcagtgttgaattcgctgggtaacaacaatttcctgattgatacacttagttaaaaaattctgccgcgcatttctcgtcttattgcgaccaaaagtagccttatatctcaccggattttccaaaatctttttaattaaaaaatacaaagcattttcttctggcatggcatctgcatcatatacaccaaggtattctccttgggcaatcttcaaagcatcatttaatacaccagctttgccaccactacctgttcgttcaattacttgaacattgattttccgttcaggatattgcttgattatttcccgggcaattttagcagtatcatcagtacaattatcagcatagattaaaatttgtaacttatcagccggataattcaaatttaaaattgcctgcgtagttttactaataactaattcttcattatgagctggtacaactaacgtaacttttgggtaacgcttaagtggcgtgattttaactaagagcttgctgtgctttaaccttggtaatcatttcatcatcaactttagctaaagccaaggccatgatttccttaatcaggtttaagaagaaacagattatttttctttcacgcttaatataattatcttcagactttataatatttgcgatttcagttacaattgaattcataaaagaccagcttctaatgtgttttttgttcttaacatcagactactggtctttttgtttgagctcaagtccaaattcaaaggacttgggcttttttaattatttattcaacttaccgtaaaaaattatacacttagaattaattttttcagtaagcacaaaaaaagctagaagcgtcagctcctagcttttatttcaatattattaaagactacttgttttcgtcttttgcggccttgttcaagaaagcaacaactgctgctacgtgagcaacacgcttctttgcgtttctcttgttcttaggtctttgatttggttcacaaccagtgttgtaattttcacctttacgcatatgctatacttcctttcagattttcgaaaatctagtatagtttaccatgtccagcccttcagatcaagtcttcatgcagattcaaaatttttcgacagatgcaggacaacaatataatttaagattcgcgtagcataactagcatccttttggaaacttttaattgcctttttagctaaatcaactcgatcagtaattaagccatcaacttgttgatacatcatcttcttcattaatttttcgtcattaactgtccaggcataaacaggacgatcctgcaaatgggcttgccaaataaagtctgaattcaaggtagaatattccattgaatatccactagcaacactttgcggataagtaaaattataaggttgaatgtaaaagacaaccaaacgtggattaattaagtgcagtccttcaaccacgcgatagtcgagtgattgtacttgatacgcatttttaagaatcgttttgccatatttttgattaaagcgctgcagcattttcttcgaatctttagccgtcgttttaatttcaattagcaatttttgatgcagtcttttggcttcctcaagatattgatcaaagctaactaacttagcatgatagccgtcttctttggcagttaacttttctaattgccgtaaagttaaatcattcggggctttattaactcccgttagcttcaataaattctcatcatgaattacgataaattttttatccttagtttcatgaacatcaatttcaacgtagtttggcttttctttagccgtttttcttaatgactgtaacgtgttttgtacgccatttttatcatcaacgccgcgatgagaaataattactggcgctttagcatttacactagtcaaatataaataattggtagatattgcattaatcattactagtacaaacacaactaatgtacttagaattatctttttagttttacctgtttgacttatcttttcttgccttaaagctttcaaaataatagataagcccagtacactaacatagactaacgctacttcactaataatttgaacaagcgaaagattgctaatggctaaaattaacggacatttcccaggtaataaatcaactaatagctgcaggcaatacattgctaaatagaaaattgtcatgactgctgcagataaaacggctaaaacaataatcctccagcaaatcgtccgccaacggtagtgcgccgttaatcgccaacttctttttactgcttgcactgactttaagtggtcaaaaacgatgatgggtaaagcaaatactagccttgcaccaaggatcaaagcggctaaataaaacgcaatcaaaacggctaacaagattggcgttctcgtcagataatccaagataaattctgaaatctgcactttgcttaaaagtggtgttctaaagatgacatcggctaacggtactaccaataaaaaatagagcatcaaaataaaaagcgtgcccaaacgaatttttttgatattttgccaagtttgaataaaactatttttccacgtaaaaacttgatgcttaatatcccaaacgccatgaagtaaataagctaattgcgcatacaagattactaataaaagcagcaactcaattatcaaaattaaaaaggcaaccgtatgcgtcgtaatgatcgtcactacatttcgataagatacgaacggaatagcactagcctgcaaaacaaaggttgtaatatagcgaaaaagtggaataacaataaattgattaaataaacttaatcccataaaaagtagcagataccgcagccaattttggcaaaattcacgactacctgcttttatttctttgacaaaagtcattgttcttccccccttacattgaaatcactttcttaattctatactaaaaaaggacgaggtcattccctcgtccctatgattaattttatttttttaacattgaccgccgttttttagatcatcagcagtaattgcttcaggttcatattgggtaacggtcatcccaccatcaataatgccgctgtctgaagataaactcaaagttgagttgcgtgcatttaccactagacctggttcaaagaaagttgtttccggctgagcagtatacaagtcaagaccagcattattttcgattgaaatattatacttaggatctttttcagcaaggattacaaactggaagctgtcgccaatagtacaagtgccgccttttttagaatacttggttgaaccatcatctaaagccaagataacaatttggtgatctgcatccatcttgcttttaatcatttctgcagcatctggtttaatattgattgaaattgcattctctgtcattttgtttcctcgtttcaatctaaattttattaacttacttatttaagtatagcacgactagttccaactaactaaaaatatgctcaaaaataccgctaatcttgatatttttttaaatttatcattgcatgcaataacaaaaaggctcaaaatggtacatagggtttttagacgattgtaatacgtaagggggaccttttatgaccgtcttaaagaatattgctaaagatagaattttacagattactgtgatcattacagtagtcagtcttttttttgccagaccgcggtttgcggacattaacttccatacattatggtctgttgccgcgatgttaacgattatccagatctatgcatacttgcatgttctggatgttttagcgtacaagcttacaagtattgccgataatacgcgtaagttgaacacgctgttttcgttgttggctgtcatttcggggatgtttttaggtaatgacattactgcattgaccttgatcccactgtatttaaatattgctaagcgttataaattgccacagattttgtctgttaccttgattgggatgggcgcaaatattggggcagcatttacgccttggggcaacccccacaatattttctcagtcagccgctttgatgtcagcccattaaaatttttcgaatggtctgtaccttatctagtagtttcaatgctaatcatgggattagtctttctgtttattcctaaagaagaaattccggtgcaaaaagctgagccaatcaagatcagctggcgcccgacgctgataactactgctgtctttattttcttcttctttggtgttttcagaaccattgatattatttggcaaatgctaacgtcggttgcattagcccttgcaattaatcctaggattatgctcaaaatcgactatgccttacttcttacctttaccggcttcttcatcttcatcagcgatatccaacaaatccctcttatcgtaaatctaattcatggcaccgtttattctgaaatttcaacttactttgcttcaattatctctagtcaggtaatgagcaatgtaccatcaaccattttagttggtaaatttaccacttatgctcaagcattattcttgggttcaaacattggtggttttggttccgctatcggttcaatggctaatatgttagttcttaagactttcaaccaacacggtagcgtaagtaagaaaaagttttttattcaatggactattatgcaatttgctggtttgattattttaactgcagttggattattactattaatcttcagaatttaatattttttgttaagaatgccgctttgacattcttttttattgctcaagaaattcgaaaacgataaaattaaataaatattttatggaggaaaaactatgtcacctttaatttggatcattttagctattattgttttaatcgtggctatctacatagtaacttacaacggtttacaaagagcgaaagtctatgctgaagaagcttggagtcaaattgacgttcaacttaagcgccggaatgacttaattcccaacttggttgaaaccaccaaaggctatgccaagcatgaaaaatcaacttttgaggaagtagtcaaattacgtaatcaattggttaatgtgcctcaaggtaaccatgaagaagcgatgaagctttctaaccaaattactgattctctgaagtcaatttttgctttggctgaagcctacccagacttgaaagctaatcaaaacttcttaaaattgcaagaagaattgactaacactgaaaacaagatcgcttactctcgtcaactttataattcaactgtagcaacatatgatcaaaagttgcttactttcccatcaaatattgttgccaagtggcaccactttactaagattaactacttagaaactcctagtgaagaaaagaatgtgcctcaagttaagttttaattttaaggaagtttaaccatgctttaccaacaaattgctcgtaataaacgcaaaacggcgttaattatgttcatctttttggtgatcttaggcttagttggtgcgggaatcggttatctttggagcaatagtccaacaatgggcgttactattgctttgatcggtagtttagtctacttattcatcatgtggcaaaatccagccaacatgattatgagcttgaatcacgcgcaagaaattcatgaagccgacaatccggaactgtggcatatcgtagaagatatggcgatggtggcacaggttccaatgccacgggtctatattattcctgatcctagtcccaatgcttttgcaactggtcgggaccctgaacatagtgcggtggcagttactcaaggaattttagaattacttgatcgtgaagaactcgaaggcgtcttagggcatgaattatcacacgtgaaaaactacgatattttactttcaacaattgccgtggtattagttggggtcatttcttttatctctaatatggcgtccaatttttggttctggggcggcgtgcgcagtgatgacgacgatgaccgtgacagtaatgctttagccataatttttaaagtggttgccttggtctttgtgttgatcttaggcccactttctgcatccctagcccaaatggctttatcgcgtaaccgtgaatacctagctgatgcatcttcagttaaattaacacgtaatccgcaaggcttaatttctgccttacgcaagattgaaaatagccaaccaatgaaagtagctgatagtagtagtgctggattatatattgaaaatccattccacaatcacggtttgacgcacttgtttgatactcacccaccaacagcagaccgcattaaacgcttagaaaatatgtaaaaaataatctggaactttcgtccagattatttttttactttaaattgatatttgcttgtctaaacaattctgcccgcatcgctgctggtgttatgtggtagtattgattaaatttcttataaaagaaagacttactcgaatatccgactcgaccaataatctctctaagtgaaatatcaggctgagccagcaattcacgcgcttcttgcattcttcgatcatccacgtgatccacaaaactcttgccagtcttagccttaaccatattagagaaataattaggattgaagccaaagtattttgcagcgtcagataaagagacatcggcaaaatgaagatcgatgtaattatctaaggtcttcttttcaaacttagttttatccaaactagtcggtgttgccatgcgctgagttctaattgaaataatcaacatagtggtcaactcagcctgaattaaagctttagtaaacaaatcattattcaaataaccgccaataatatgttgcatcacttgagaagcacgagtaatttgattattttttagccaaagaacatgttcattttctaagctatcaacgatttgctcaataactttaacctcacgttctcccttacagctaaaatctttaaaatacttgcgatatagaaatccacgcttaaacttcaactttatcagtaccgtatcaggtttttgacttaaaatctcatacttgcaaccttcagtcagtagcaaaacattcccagacttcatttgaatgatcttttcaccactcttaattgtcacagtacccttagcaatatataaaatcgttgaaacatccatccgatagcgataaataccagtattatgattttcaaggtagatagtaaacagatcaaaatctggattaccagcttccaactttatttcattcttatctgttgaatttgactttaatacacttgccagatattggtccaaagcaacagctgccatatgtccaccttccttaaattaaataaaatatggtaacactataattacattataaatcaaaactttatttagtattaagtattatttatgatttgttctacttataacaaactctacctgtagacagtccccaaagcatcttgtacaatcaagcttatgaaagtaaccgttaacaatcttactttttcttatgaaaaagaacctattatcaatcatctaaatattgaaattccccatggtttttctctgttaattggaccgaccggctgcggtaaatctaccttactcaaaattatcgctggtttgtatcccaaatatgcagggcgactaacaggtatggtggacctgcacggacaaaaggcggcaatgatgttccaaaatgcggctgaacagtttacaatgccaactccacgtgaagaaattgtctttgctttagaaaatttacagttagatgaaggtgagtatcaaacacgactagatcaggcaacagctttcacccaaattgcagaccttctcgatcaaaagattaatactctatcaggcggtcagcaacaaagagttgctttagctgtcttaatagctatggatgtagatttattgctcttagatgaaccgtttgccagttgtgatcctaagacacgtgcttttttgattaaaaaattagcgattttagctcacaacggaaaaactattattttaagtgaccacgttttagacgattatgaacctgtctgcgaccatctttttgagtttacaaataatcaagaagttattgaattaaatgctagcaaaaaaatagccttatttgaacaaaataaaaaattgcatgagcgacattatcattttgtcttacctaatagtgagcctattttcactttaaaacaagtccaaattagacaaaacaagcttttgcttaagcaaaatgagctaaatttgcattctggcactaccctaattactggtgctaatggtgttggcaagacgtctttatttaaagtaatgaccaaaatgattccgtatactggtaattttgcttatttaaataaggaaatcgctcaaatctcagctagaaaatatttaacacaagtagctcaaatttttcaaaaagcaagcgaccaatttttagctgtgactgtcaaagatgaactagaattaagtaaaaaggatagaaatttattttttactgaagaaaaggtcaatgaatggctagataaattgggtttagccaaacacttagaccaagttgtttattctctctcaggtggccaacagaagaaattacagattctattaatgctaatgactaagcatcaggttttattaattgatgaaccgctcagtggacttgaccataactcggtcaaactcgttttagaattaatgcgagaaagccagcaaaagctccaccagacgttttttatcattagccatcagatagacgagctagctgaattttgcgattaccacctgatttttgcggatcagcgcttaaaatatgtagaaagataagcttatgaatcctagtttaaaatttcttttagcatttattatttccctggaaatatctttaaaagctagcttagttactaatttgttagtaatcaccttcgcgctagtttatttaattattactcgattcaaaatcaaagagttaatcttgctcattatcttgccctttattgctgcttttacaatctttgcaacgctcttttggttttcaccaacaccaaatgcttattatgcttggaatttgtcaacgcgtatctatgtttataccttgacgattgcctgcgtgacacgtaataacaccgctacagactttgcccgatcattagagcagaacctgcacttacccagtaaatttgcctacggcgtgctggcggcgattaacattattccgcagatgaagatggcggttaaacagatccgaactagcgctatgatgcggggcatttatctcagtttttggtcgccggtcctctattttaaagcaattcttgttgctttaaattcagctgacaatctggcccaaggaatggaatcacatggctatgtcgaagggcaaagaaggtcgacgatcatcgctattcctttaccagctagagattgggtaatcttctttaccctgctaattttggttaatatctcattgtttttgttcaaataggtgaaaaaatggaaattatcgaaggaaaaatgcctttcatgggctatgaaacttactatcgtattgttggtcgaagaagcgaaaagacaccactcgtattgctacatggtggtcccggctcaagtcataattattttgaggttttggacaaattagccgaaattgataaccgacggattatcatgtacgaccagttaggctgcggcaagagtagcatccctgatgatcaccctgaactttatactaaagaaacatgggttaaggaactcatggcgttgcgggagcacttggctttgcgcaaaatacatttattaggacaaagttggggtgggatgctagcgctaatctacatgtgtgattatcatcctgttggcattcaaagcttgatcttgtcttcaaccttgtcgtctgcttccttatggagcaaagaattacaccggatgattaaatacttgccaattgaagaacaggcggcaattcatcgcgccgaattgactagcaattttaacgatcctgattacttaaaagctaatgagcacttcatgaatcaacatgcaattgacatgacgaaaacgtggcctgaatgcgttatgcgaaaaaaatgtggtggtattgtagcttatgaaaccgcctggggaccaaatgaatatacgccagagggcaacttgcacgattacgaatacacagaaaaactaggcaaaataaaaatcccaactctaattacgagtgggactgatgatttatgtacaccttatgtagctaaaacgatgcaggatcagcttgctggcagtaaatggcagctatttgaaaactgcggtcacatgtcttttgtagaaaaaacagatgaatatgttgaaatgctgcgaaagtggcttgatcaacatgactaaaaagtaaatatatttacataaaattaataactcaacgcccgatgagcatctaaagcccaatgcgttgcaaaaatttcctgcttgattttccgcttggttccagtccaaggatcattataatagatcgttttaccatggtaacccgtcaaggtaatagcatggttagagaggccgtcaaacatccctacccaaacaaccaccaagtgtgaattaatcagcttatccttaattgcgggcaaaccacaattaatcatattctgtgctctaccaagataatgcttcactactggtttcaccccattaggagcaacccaatagccgagcggatatttcttgtaaggcgaaccgataaagcccttgttagggttagagctgcgcggcataatcttggccgcctgctgtttagttacctttttaccagcaaaattaatcatcattgtcacggcagtaatttcacaaccagttggcatttcaggtagttggctaattaccttggcgtagttattaataccaactatcttgccgcttttattaatccaataatatgcttttttagtcttggtatttttaaaacgttgcttgcctgcttgatcaaaatagacataatgtttaccaacttttttaaggccagtatacttaggagccgattgattagttgtcgcggcatcatcattatcagcggcatgtactgtttggcgagttaacaataatgaactaaagcccaggctgactaataaaatagctaagtattttttcatatttttccttaaataaatggtcgcttaataccagcaattacatttctttgtgaattaacaattggttgaaccatcacacgtggtggccagctttcaattacccggttattgcctaagtaaatcgcaacatgccaaatagtgtgcgtacctggttggtaatagaacactaagtctccacattgtctttgtgaatatggaacacgctttaggtgcttgtcagcccaaagattacgtgaattccattcattgcctggatgagcgtggccgattgaactagttggaactggactaatgccacctgcataaagaccttgcattaccaaaccagaacaatcaacaccgtagcttggactagttgaacaacctgctaaccatggttttcccatatatttgtaagcttgattaatcattgcttcaatatgagctttacgcccttgccaagcataagccttaagtggggcaacataactatcaatgctataccatgacttcttagaaaagcccatcttttcccaagtagctaagttaacattaccagttgctggcaagtggtgactacgttggaagttctttactgcgttataagtagcttggttatagtaattcgtacctgcccaagtaccaactctatgcattactttccaagtcttaataccctcatagccacggtacaagttataacccaccttaccgtatggtttaacttgtgtgtaatgtacttgatgataacccttaggattttggtaggctatgaccttagttaccaaagattttttagcaggcaaatacaagccatcactagtctttagtattggtacttggttgtcagatttaacaattcgactaattaaaaagtgtgatcctgcttttacgctctgtgctgatttagtcaatgcagcatccttataagcagtagttgcatgcttaattcgcactaatttagggttagcagacaaataatctgccttgttataagtaaccttatctgaatcagaattagtttggtcactagttgcagttacttgcgtctcattagtattagctgttgtgttagtatcgtcagccttaacagtagttgcggcagtacttacggcaactaaagcagcaataacagctgctgtccatcgttttctcattccaacatcctccatgatatttgtaaaatcaatttcattttaccttgattacagaagattttctatggtttttgaggcaaaaaaacagcaactattatgttgctgtcgtaaatgatattcaacttctaattaaagtttgatgttcttacatattgcttagcaggtccgccaattctgtaatagcgtttgccattcttaaacttgtatgaaccaccgtaagttgtcactgtggagcctttgtacaacttccaagcaccgttatgcgtagtgcgttttttttgatgtactgtagatgtaggcgttacgctttaaaacgcgaccttgaccactaatattggtcaccttaatataagcatccctatcagccaacttgtagaatttagcgccattaattgttatgggactttgatttacagttactgcacgatatgcgtaatacttttcacccaatgacttgccattttcatcataaaaaaagccgccccgaaggacggctgtattgagtctacctccttccacacgagtaagggcgctaccccttcagctaagtgtataattttttacggtaagttgaataaataattaaaaaagcccaagtcctttgaatttggacttgagctcaaacaaaaagaccagtagtctgatgttaagaacaaaaaacacattagaagctggtcttttatgaattcaattgtaactgaaatcgcaaatattataaagtctgaagataattatattaagcgtgaaagaaaaataatctgtttcttcttaaacctgattaaggaaatcatggccttggctttagctaaagttgatgatgaaatgattaccaaggttaaagcacagggctatcagattgataagaagaatgagcgctcaatcaatatggcttttggcgaagttaggtatgtcagaagaagatatgtctgcccaggcaaacaagcaaggtatcccttggatgaattaatgggctttgacaaatacaagcgctacagtattttagcagtcaaaaacatcttagaagtaagcagcgttgccacttatcgcaatactgctctagcagtcaattgcctgtctggctttaatattagccatatgcaggtgggcaatttggtaaaaatggccgggaaaaatattaaagcgggccaagaagcagattcaagatatgatgccgcaggcactaagaaaaaggtcccagttttgtatcttgaaggcgatggcgtggtgatcaaaggcactaaaagccggttggaatttcatcgctatcaggtctgtgaaggcattgtcaatataagcaagaaacgcagaaagcgaatcaatgccaaggaatttgtttctttaagccgacttgatgcgctgaacgaagccaaggagtacctggccaatacttatgatctttctgatactgtaattcttagcaacgccgatggcggtgctggatatgccaaaacagacttcgatgacattgtagggctatgcaagcgtcatgagcatttcttggatgtctttcacctaaataagaaaatcaaagaaaggctatattttgcgcctgacctgcaaggcaagctgatttctgctttggaatacaaatacagctatgacaaagttaaaactatcctaaccactgcagaaagccgactaattgatgaattgaataccgagctcaatcatgattatctggggcgcctaaggaattatattgatcgtcattgggacgatattaagccgtttaagaaacgaaaactgactgtgactaaagccattggctgctgcgagagcaaccaccgcaagtatacctaccgtgttaaggggcaaggcaagaaatggtcaaaatctggagcagaaggcatgcttaggatcttaagctgcatcaagaatcgagagctggaattttggcttagcagcgagtttgaagattcagaaataactgtattgactgaacaggaattaaaagcagcggcccgtgacagcttaaagaagcgtcatgaagttcatttaggcatccagcatggcgcattaaccgcacaggtagctggcaatagttatttaagcaagctaagcagaaatttaagtcatataaatatttaagaaattaaggttagactaatggtttaaaggctaccgcaaaaacattgacacttacccccttcagcgtgcagttttaattttaccatttatgtgttaaaattgagatactacaaagataaagtacacttcagcgtgtgcgtgagctactagctggtagctcaaaaattatcagggcgatcgaaagatcgtcttttttgttgccaaacataatttaacaaaatctatttttaaatcataaaaaactaaaaaagcactgacctgccacagtttttttcaatatgcttgtgaaatctgcaaatatgcaaaaataaaaagcccaatttatgggctttttctatattctacttatgataaggactacctgagttaatcataaatgcacgatagatttgttcaatcaacaccacgcgcatcaactggtgtggcatcgtcaatttaccaaaactaatcaagtcatttcccctcttgtttacagcatcgctagtccctaaactgccaccaatgacaaacgtaatgtctgaatgaccataagttgcgagatcctgaatctctttagcgaactcttcgctgctgcgctgctttcctttaattgcagtcacatacacgtactccttatctttaattttgctcaggattcgctgaccttcaatctctttaaccttctcatcttcagctgcactgaatttttccggtgctttttcatcaggcacctgtacaatggacacctttgcaaaacgactgagtcgtttctcatactccgcaattgcatccctaaaatacttctcttttaattttccaacacatacaattttgatattcatgcttctattataacaagcatagctaattttccattcataattttaatctaccagcacaatactaacatcccttccacactatttacccaaacttttccacaaaacttcaaagaccaatttcaacattttgtggtattattttacttataccccagaagttgtatttaataatttttctaaaatttctttattcacatcgattttatgaaagccttttttcacaaactttatctcttaaggcttgttatgcctgcatgaacgcctgttttctcaaatagaattcactaaataaggtcaaaatcatcatatttttccacaagttaataaacctatatttatcaagttatacacaatccacagagttatccacacttatcaacaggctagtgtctgtttgacaacaaataattccgaacaatttgatgttacacatttaaaaagttaacaaaaaggctatatctacgtttaaaccgcgtgatatagccttttttcttttaattaacttctattttgatttttagttaccctcaagttttacctttaagttgacatccttaccatttctgttcacggtaacatttacggtatcaccgactttatggctgtataaaatgctgtgtaacgatgccacatcatcaatcttcttgccgtcaaccttggtaataacgtcgccgctcttcattccggcattagcagctgaactattcttgtttactgaggcaatgtaaataccactcttcaaagtagaatttatcttcaagcggcttctgtagccttctggaataccttgaagtgcgattacccttacgccaagttgtggacgggtaatcttacccttcttaactaattcgttcacaatcgtaactacttcgtttgatggaattgcaaagcccattccttcgacagaagtaccatcacttgattgggctaacttcattgagttaatcccgatcacttgaccagctgagttaaccaaggcaccacctgagttacctgggttaattgcggcatcagtttgaataaccgtttgttgattgcctgatgaagtagaaatggttctagccggtgctgaaataatcccttgcgttaccgtagaagcatattcactacctaatggtgaaccaacggcaatgacagtttgaccagcttgtaagctcttagaatcgccaaattcggccgtcttagtcacatacttagcatcaattgaaagcacagctaagtcagttgtactatccttaccaacaactttagcatttactgtcttgccattagctagcattacctgaacagcatcactgcctgagataacgtggttgttagtaacgatatagcccttgccattagatttcatgtagactacacctgagccttcactgtaagtctcaagcttgcccttgctgcttgatgaatagctatcatcactgtcatcattaccgaataaactattataaagtgaattagtactattagaacttgattggcgttttaagttaataactgaaacaaccgctccttttacatcattatatgcagtagtcattgtgccactagtcttagcactcttttctgaaactttactactacttgaagatacactagtttgagcggcaccattattaactgatgcattattcatttgatcagctgcgtaatatgaaacgcctccaccgatcaagccaccaactacaccgacaatcgctgcagtggcaatgattttaccattagtattcttttttctaggttgttgtaaattgttattattattttgattttctaccatgcttgcttctcccctcatcttgtttactaatcataccgattaaatttgaatattatatgaaaaaatgttgtgaaaactgctaaatttcaactaattttgtaggctgattaggttctgtatcaataatcttaacatcatcatccaaattcgcatccccctcaagcagcatttcctttgccgtttcgtgagctaaatactccgtattattatgttggctgcgatgcgctaaaaagatatgctttgttttaggtgtgactacatcaactaatgcctgggctgcttcgtcattagataaatggcctacatccgacaaaattcgctgcttcagtgcccaggaatatggtccatctctgagcatcatattatcataattaaattccatcatataggcatcagcatcttcaattgtcccttcaacttcttctgatacataacctgtatcagttaaaaaagcgacccgcttaccaccactagtaaacacataatattgcggctcagctgcgtcatgactagttgcaaaggcagtaatatcaacatcaccaaaagttttagtttggcctggttcaattgtattcatttgttcagccggtaatttacctatttttttcgtatccaataaatactgccaagtcccactattggcaaaagcatctatcttaggataacggcgcatcaacacgccgagtccgccactatgatcggtatgatcatgacttaaaaaggccatatcaatctcgttaatatcaactccaacttcggctagcaaatctttagttttcttaccagaaatgccagcatccatcaggattttatgctggcctgtaacgattaaactggtattgccggtcgagccgcttgctaaaacggaaaccttcaatttttgtcccttctacttttctacattataggtactcgattgtagcatctgtgccgtatatgcattaatacgtttcatcgtgatatttttagttgtcttattttctacccaaaccagccaagttggcaacaagattgtgctgccacgtacttctgtcagtttggagtaacctaattttacctgcgttacgcgcgaattattagtcaactcacgatcagtgtacatcgcacgcacagcacgccaagcactgatggttgactgtaattcacgcactggactagcttgccccatatatgtttcagtaaaattaataatctgattatcttttacattgatattcaattgggccgagttagcataaatttcaccataatctgagttttgcacaaaaacataattgtcttcactcgacatatcaggttcatacttgaattctttaccataaggaatatttttcgaatcattcttaaaatcttcaatttgttctaaagcttccttaggttttttactcaaaaggactgcttgtcttggttcaccataaagcacattatcgcttttagaatagcgggcatttacattagtcagcgagctaactttgccagagagatagtcacgattcttggtagctaaataataaccagaatctggtgcatccgaaatcttatcgggcaaatcaatattgtctgacttcatttcattgcggatgctagcaacactacgagtagtggtatcagcgttacttaaattaacgggagaacggagaatttcgattccaagataaatatcaattaaaaagaaaacaacgaaaaatagccattcgattcgtttatggtccatttctattttcccccttcgttaacagttaactgatcagcttcacggtaggtagatacgtcttgcttttcccattcacctaggctcttccattcatcgtaggctttgatatagtacgttgggatcaagttaatcaaactatggtgacttgaatccttttcttcagcaaaaccaacgataattcgttgaatatcttcctgctttaggccgtgattgactaattcatcaacaacatcttgggttggttttaaccgcttagtttgaccatcaaacggaattggaatttggaagtttacactattaaaggccacattaatcgaatctgttgaaaaggtcgtcttgacttgcaaatcatgcttatttaagaaaacaggaatcccttcaatatagtttagataactaacattagcaccatctgcatcaaagaagcgtaaatcttgctcggttaaacccaattggtgaacataataaacgctatctaataagcggttagtagtattggggatcttatttttttcataatgagtataaagataattatgctcacctgaattagaatctggcactcttaagcgagtatagtagttcaaagaatataccgtttgaccattcttattagtcttactagtaacgccagatgtacctaataaacgcgaaacaaagtaagaatacgattgatgattagtcaagtaactataaactttagcattcattgtcttgatgtaaaacggtgaatagccttcctttaaacgaactaatctaactggatacttgctcttagcattacatgcatatttacgtagtttatcaaaatttgcgccagcaatttttacttgataaatttcattagtctgatcatttcccaaataaatccagtgatttgactgcgagataaagaagcggttaaactcgcggttatcatttgcggcattattcaactggttaaataaggagaaagtaatttcatctggataaaccaactgcacatagttgggattgtttaaatactcttcatatttagttctagtatcaactattttcttaattttattagtggccttggctttttttatctctttggtaaattctaaagtcaaattattttttgaatcatatagctgacacaaatttccattagcaaaaccatatgaagtagttggaatatataaatcatataatgacttaaaattgtgactacgcgtttgctctttagtgatattattttgattttgctgaccaatattactaaagcgctgatcactagtcataataaagatccaaagcacaattgagaggacaatgacgatcagtgtagctaagcctaagaaaaattcaccgaatttgaatttaaacttcatcccaatcatcctcctctgtcatcggttcatatggcaaggaaatatagaaagtagaccccttgccttcgctactgtcagcccaaattttaccatggtgagcttccacaatttctttagcaatggccaagcccaagccggtaccaccttgggcccgggaacgtgccttatcaactcggtaaaagcggtcaaagattttacccagatcttttcttggaatacccaagccctggtcagaaatacttaagataacatgattttggttttgggtcattctaacagtaattacaccgccatcaggtgaatacttaattgcattgttcataatgttatcaattacctgcatcatcttatcggtatcgatttccacccataaggcttgactgcctaattcacgcttaattgtgtatttcttcttttctttatttttatctgttttaacaatcatatcgaaacggttaagaatatggttaacaaaatcgtttaagttaacaaattctagatccatttttgaaacgccacggtccattctagacaaactcaacaagtcattgatcattctaatcatccgactagtttcttgttgggtaacttccaaaaacttaggagcaatctctggattcttccaagcaccctcattaagagcttcaatataagcctgcaaacttgttaaaggtgttctcaattcgtgtgagacattagaaacaaactgtctttgtgaatcttcattcttttgttgctcagttacatcgtgtaatacacaaactgaccctgatacaaagccagttacccgcttaatcaaagaaaaactagcatgcaaaataatttcatcccgcgtacctggatcaagggtaataacgatctctttttgactagaaatcaaatcttgtgacgaagtatcttctagtcccagtacttcagcaatcggcttattgataacctcgtcttcttttttatttaaaaagtttagtgccatatgattaaccacactgacgttaccatgacgatcagtggctagaactccatcgctcatgtgtgacagaacactatctagtcgccgccgttcactatcagactcttcttgtgagcgttcaattcgtacggacagggtattaaatgctttagctaattgccctagttcatcattggaataaatttttacctgacttgaataatcaccatcagcaatatgcaatgcttgtttctgcatttcttcgatcggttgcgtaattgcccgggaaataactaatgacaaaaatgcacctaataaagccgcgatcaatgacgcaatcaagaaagtcaatgaaatttggcgcaaattgttaaagacatcttgcatactagctttaacatagacagcaccaacagtattgttagagccattgccactagtcaacggcgatatttgaatcatgtaattgccatgatcatcgaccactttattaatttgatgtccagttgaaataacctgcttcacatcagtattgttaatccgttgaccgatcttacttttatcatttaagttagaaacggcacgaatcgtatccttattatcgacaacaataatttcactaattgcatcattattgtagtcattaacaatttgattcaagcgatcattagtatttttattatcactggtcaactgattagctaactgattgctgacgatagtctgaatctggattgatgattggaaattttcaatgctattttgctctaattgacgggtaaaataagctccaataacttcaattgttgccagtagcatcagcatgaacacaattgcaattttagtattaatggaattaaatgtactatttaatcttgctttgaattttttcattctactcattcaatatctaaaaaatataaaaaagaaagccactaccataacagttctgtggctttctttattattcttcactcggctgttttacataatagccaacaccacgacgggtaactaaaatttgaggttggattggattatcttcaatcttttctcttaaacggtgcaccgttacgtctacagtccgcacatcaccgaagtagtcataaccccaaacagtctgaagcaggtgttcacgagtcataacttgtcccatatgttgagctaaatagtaaagaagttcaaattcacggtgagtaagttcaatcttcttaccatttttttctacaatataggcatctggcataatgaccaagttaccgatcttaatattcttatcggtctcttcttggctggcagcttctgcttttttaacaatatcacgacgacgcaggttagccttcacacgggcaactaattcccggttagaaaacggcttggttacgtagtcatctgcacccatttccagtcctaagactttatcaatttcagtatctttagcagttaccatgataattggcatgtcatgcgtttgacgaacttcacgcgcaacttccaacccatcttttttgggcaacatcaaatccagaatcattagatccgggtcgtattcgtcaacttttttaacagcttcttcgccatcataggcggtgtcgacatcaaagccttccttagttaaattaaatttgataatatcagaaatcggcttttcatcgtcgacgacgagaatcttctttggcatcgggaatgcctcctttgcccttacattatactgaattttgtaacattagccaaaaatttttgttttttttcaaaaaaagcttgcattttcttatcaacaatagcataataatatctgttgattgattcaacgacatgggtggctagctcagctggcagagcaacggactcttaatccgtgggtccagggttcgatcccctggccacccataatatttttcgtaagggataagatgttgatcttatctcttttttgtttcttaaattggatttagaaagggctttattggtaaaataaaattagaatttgtacgagggggctttacaatgaacgaagctgtattttttaatccaggggatgccatcgcatcttcacacgactttaaagaagcacgccgcagtgctcaaatcattaaggcagaacgtccaacagggcgccaaattgtgattgccaaaaatgatcaaagcggtgtctatgctgtttactatgcagatcacatgaagcaggatcagcaaggcacagcctatcatattcaagataaactttagtaaaaaagcggccattatgggcgctttttgctagcttcaaattatttttcaacttttttcaaaaaaagcttgtcaaattataaaactactggtaatatatttaaatgtcggcgggagctgatgaacaaatatgggtggctagctcagctggcagagcaacggactcttaatccgtgggtccagggttcgatcccctggccacccataatatgaaagatgcactgcaagaaggcggtgctttttttatgctattttacagaggattcgtatttttcgatcatgaaattacgaatcttttttattttctttcagcattcctctcgtcttaggaattaggcttttttccatggtatcataggatacataagtatcatggagggcaagatgaaacggatttattattaccaaaaaacaaccgatgatgtagtcgatagtcacgatcaaaatttcagtctacccgataattacgttattctacctaattctcttggagctagaatctggtccactaccgcttgtcacttagcatgcgcttttggttgggtggttttccgcttcttcgatcatgtaaaagtcgttggtcaagaaaaacttaagcaagtcaatgggggctattttatttatggcaaccatactagacccatgggggatgtctttacctcgctcacaatttttccaatcaaaaatttttatgctattgctaatcaagctaactggggcatccccttcattggcaaatatcttgtacgctacggcggtctgcctgttggcaaaaatatgaagcaatcgctcaaactaattaaagccattcaaactgtgattaaggataaaaagggcgagattctcatctaccctgaagctcatgtctggccctattacacgaagattcgcccgttcgatgcaacaagcatgcactttccagttaaattaaatgcgcctagtttcgtcatgaccaaaacctaccataaaaagtggcttagcaagcggcctagtgccgttatttacattgatgggcccttttacccggatacaaatttaagccgtaaggaagctcaaaataagcttcacgatgaaatttggcaggtaatgaagcagcgtgcaaaaaatagcgattatgaatattgtcaatatattcaaaagaaataaaaaataggagtttatcatgaatattcttttttgtggagatgaaaatgctcaagatggcgttttgatttccaccttatctttaatcaaaaattctggtgctcaagaattgcatctttatattttaacgatggaggcacacagtgatgaacgtaaatatcaccctttctcacaacatgcggctgattttttacgttctttagtaaaaaaagccaatcctaacagtacagttgaattaattgactgcaccaagttatttgaacaggaaccgccaaccgctaacatgaatactcgcttcacgccatatgctatgttgcgtttatttgcagaccaattgccacagattcctgatcgcattctttatttagacgatgacattgtcattcgcggtgatattacaactttttacaatgaggatattaccggaatcgaattagtgggcgtacttgattattggggccgcttcttcttccacaatcttaagaccaagcgcgcatttgattatcttaattctggcgttttgttgctgaatatgaagaaaattaagcaaactgatctctttgccgaggtgcggcatatgatgcaggttaagcaaatgtttttgcccgaccaatcagcaataaacaagctagctgtagccaagcgagtagcaccacgccgttataatgagcaatatcatttgcaaaaaaacaccaaaattcaacatttcactactagctttaggttttggccttatttccatactcaaacagttaagccatgggatgttgatcgcgtacacagtgtacttcatttacatgaatatgatgatttgcttaacgaatatctcaaattacgaaataatttaaaaaaataatttaggaggatcttattttgaaaaccattcctgttttttacacaattagcgataattatacgccatatgcatatgtttcaattaaatcattaattgaccatactgaccccaagaaggactatacgattacccttttagtccaacagatatctgatgagcacaaaaagagcttagaagatctttcaactgataatattcatgttcaaatctttcatattgacgatgacatggttaagccaattcacaatactaaggaaaactacttgcgtgctcaattctttactatgtcaattttttaccgactattcattccagaattgttccctcaatatgacaaggcagtttatcttgatgcagatactattatctgtactgatattgctaaaatgtatgaaattgatatcgccgacaacatgtttgcttcatgtcccgacttatcaattcgttacatgccacttttacaaaagtacattaaagaatgtcagggaatttttcctgcagaaaaatacatcaataatggtgtaattctgtttaatatgaaggcctttagagacaaaaagtttgttgataaattctattacttaatgaataaatatcatttcgataacgttgaccctgatcaagcctacatgaatgaaatttgcgaagataagatttatcacctacctaaagaatgggatgctatgccaaatgaaagcattcctgaaattcaagatcctaagatcgtgcactacaatcttttcttcaaaccatggcattttgctgatgttcaatatggtcattatttctggtatgttgctaaaactacgccgtattacgatgaactaaagcagcaattagacaactttactgatgaagaccgtcaaaaggcccgagctaacctagaatggatggccaaaaaagttgacatgattgtcaaagagccaaatacctgggctaaggttaaacaaacggaatcagttaaaatctaagaaaggtaattttatgacaattcctatctctcatcaaagcatcaaaaagctttgtctgatcttagcagttcaaacgttcatgtgaagtttttccatattgatgatcaacttgtacaacctattcaaaatcgtaaggaaaactttcttcgcgctgacttttttaccatgtcgattttttatcgcctctttattccagaactttttcccgaatatgataaggtgatctatattgatagcgacacaattgtaaacgacgatcttgctaaactatacaactccgaattgggtgataatttatttgctgcttgcaccgactcctcaattcaatatgtagacaagatgataaaatacatcaaaaatgtcctggcacttgaccccaagaaatacattaactctggcatgctcgtcatgaatgctagggcctttcgcgctgaacattttattgaccattttatgacacttttagaaaagtatcattttgattgtattgctcctgatcaagactatttaaatgaaatcggggaaggcagaattttgcacttaaatcctcgctgggatgctatgccaaatgaaaacactgaacctttaactaatcctggtctgattcactataatcttttctttaagccatggcattttgctaatgtccaatatgcacagtacttctgggatagtgccaaacaaacgcagtttttcgatgaattaaagaacgaactcaataattatactgatgacgagcgtgcagcagaccgcgaaaaattggatcatatgcttgctaaggaagacaaaactgagcaagatcctaataattgggcaaaagttaagaaacgagaggcagtaacactatgatttttggcgataatcgtgaggcagtgattaaaaatataaaaaaagctgctaatgaacgtaacttcacagcaaaagtagaaatcggcgatccccaaatgtccctagatcagcgccttaaattggtcaatgattattggaataagcgtaacactttttcaagtaagcttaataatcgtattggacatctcttatttggtactttatccagagcattagctggatcaactgaatttgtaggtttagagaacctaaataatttacctattggtggcgcaattttaacttctaaccactacaatcaggttgattctttaccaatgaagctgctcgctaacaagatgcaccatcagctttcaattgtaattgaagatactaacctaatgctaccgggatttttccgctatttaatgaattatgttggcactattccactagttcagagtcctagctatattggaaatgaatttcctaagcacctcagtgcagctttagctaaaaataattgggttttaatttatccagaacaggagatgtggtggaattatcgcaagcctcgcaaattacaacgtggtgcctattattttgcggctaaacaaaatgtaccggtagtctccacttttgtcgagattaaggatctacctaaaatcgaaaagaaagatcctaatttttatgagaccaaatatattgtccatgttttaccaccaatcttccctgacgtttctctaaacgccaacgaaaacgctcataagatgatggaactcgactaccgacaaaaagttgctgcctacgagaaaatttatggtaaaaagcttaattatgactttctagattgggatattgctgggtggcgtggtcatctttcataagaaaagcataagactccttcgtatctcttgctataaggtgacaaagtgttaccattaatatatcaagatcttattagaaaggagcttcttatatgagaaaatttactaaagaaactctatcaaattacaatggtaaaaatggacgtccagcttatattgcatttaatggtactgtctatgacgtaactaataatacccactggcttaatggcgaaaataatggtatccatgctggctgtgatgttagtttggacctcgctcaatctccagttctggaattggcccacattaatcaagttggtatttacaactaaagataaactaaaaatttgatcaaaatgaatccataaaacaacgagagaattgctcgttgtttttttgtctaactcagcattttatacgctgagttaattatttgattcaactacagtctttaattactgatgattacatttttctaatacgagtgcttatctgacatcacaccaactgattgtttgtatgaattacttggtaacatgaatatttttgatctataaatcataagagtaccagtcaggttgttgctctttaaaccccattcttgtaaacatttttttgctttgaatattaaagtcatatatgtgagccttcacttgcgtcattttctgaattcttgcaagctgcaccaatttgtcgacacattttctaccaagatgcaagttttgatattctttgcaaatcacgattgatatctcaccgtcttttagcaaagtacaatcaccaatcaatttcccttgatattgaatatagtagcaccacccatgcactgacaaatattcatacattcgacgtaatttagttaaatcataaacggtatcaatattatctacctgcttacagattttaggatcctggtaccatttaagagtctgcttttcattcgggaaatatggcactaacgtaagtctatcagaatttttatccatctaaatatgtccttttttctaagtatttaatgtctgaaatttaacatatacttttgaatatttaccagtctaatagagagacaaagacaacaagtttatacatttcataacgcaaataaaaagctataacttctttattagctctataatttttcctgttgatgaatatttatgatattctgtctcaattaagctatttaggagttgtgctatgtcctctgttaatgattgtattaaatttgatctcgatattaaagataaaaatatcgttttttacaacaatttctataaattcttcaatggagtgcaatacaaagtctacgaagcccttttaaagcagcccacttgtccattctgtggctttccggcagaaaaaataacgtatccatcaataccattcagagtacaaactcctcaaagttccttggaaaccctatttaaaaaaatttcaagacttagaaaagcttaattatagaactttaatagcacacaaaaaggcggaagcctctggcccccgcctctttcatattccgctagctccggctgtcagactcgaactgacgacatcttgattaacagtcaagcgctctaccaactgagctaagccggaatattaaaaaagagcacggcagcttcctttcctcgcaggcagttgcccaccaactactttcggcgttaagaagcttaacttctgtgttcggcatgggaacaggtgtatccttcttgctttcgccaccgtactcttttgagcttttacactcaaaactaaacataatccttctcgcaaaaaaccttccagtttgcttcgctttggtcaagtcctcgactgattagtactggtccgctccatccttcacaggacttccactcccagcctatctacctcatcgtctctgaggtgtcttactgcttacgcaaaggaaatctcatcttgaggggggcttcgcacttagatgctttcagcgcttatcccttccgcacatagctacccagcgatgctcctggcggaacaactggtacaccagcggtgcgtccatcccggtcctctcgtactaaggacagctcctctcaaatttcctacgcccacgacggatagggaccgaactgtctcacgacgttctgaacccagctcgcgtgccgctttaatgggcgaacagcccaacccttgggaccgacttcagccccaggatgcgacgagccgacatcgaggtgccaaacctccccgtcgatgtgaactcttgggggagataagcctgttatccccagggtagcttttatccgttgagtgatggcccttccatacggtaccaccagatcactaagtcctagtttcctacctgctcgagttgtctctctcgcagtcaagctcccttatacctttacactctgcgaatgatttccaaccattctgagggaacctttgagcgcctccgttacactttaggaggcgaccgccccagtcaaactgcccacctgacactgtccctggcctggcttacaggtcgaggttagagcatccttcaaacaagggtagtatcccaacattgcctccaataagactagcgtcctatcttctctggctcctacctatcctgtacatgtttaaaagatactcaatatcaagctacagtgaagctccatggggtctttccgtcctgtcgcgggtaacccgcatcttcacgggtattataatttcaccgagtctctcgttgagacagtgcccaaatcattacacctttcgtgcaggtcggaacttacccgacaaggaatttcgctaccttaggaccgttatagttacggccgccgtttactggggcttcaattcaaaccttcgcttacgctaagctctcctcttaaccttccagcaccgggcaggtgtcagcctctatacgtcatcttacgattttgcagagacctgtgtttttgataaacagttgtttgggcctattcactgcggctaaccaatctcttggctagcaccccttcttccgaagttacggggtcattttgccgagttccttaacgagagttctctcgctcaccttagtgttctccactcgactacctgtgtcggtttgcggtacgggtatgtcatctctggctagaagcttttcttggcagtgtgattaccacaccttcgctacttttaattcactcctcttcacaactcgtgttgctggttagaagcatttgactcttaaccgcacttgttgcttgaacatcgttccatcgcgatgcgtgcttcacctcctgcgtccctccttcgctcttaacgatttgacacagtacaggaatctctacctgttatccatcgactacgcctctcggccttgccttaggtcccgacttaccctgggcggacgagcctgccccaggaaaccttagtctttcggcggataggattctcacctatctttcgctactcataccggcattctcacttctaagcgctccattgatcctctcgattcaacttctccgctcttagaacgctctcctaccacgtgctctttaaaacacatccacagtttcggtactatgcttagccccggtaaattttcggcgcagcgccactcgactagtgagctattacgcactctttgaatgatggctgcttctgagccaacgtcctagttgtctacgcaactccacatccttttccacttagcatagatttggggaccttaactggtgatctgggctgtttccctttcgactacggatcttatcactcgcagtctgactcccgtgtatggatatctggaattcgtagtttatctggattcagtaacccctgacgggcccctagtccaaacagagctctacctccattatcctctccacgaggctagccctaaagctatttcggagagaaccagctatctccaagttcgtttggaatttcaccgctacccacaactcatccccgcaatttttaacttacgtgggttcggccctccagtgcgttttaccacaccttcagcctggtcatgggtaggtcacttggtttcgggtctacgtcacctaacttttcgccctattaagactcgctttcgctccggctccgtcttttctgacttaacctcgctagataacgtaactcgccggttcattctacaaaaggcacgccattgcactttaatgtgctttgactacttgtagacacacggtttcaggttctttttcactccccttccggggttcttttcacctttccctcacggtactggttcactatcggtcactaactagtatttagccttgcgagatggtcctcgcggtttcaaccgggattcctcgtgtcccggcctactcaggattctgctaggcgtgcttgagatttcgcttacggggctctcaccctctctggcttaccttcccagataattcaactatctcttacactgccacgtcgcagtcctacaaccccaaatgataaatcacttggtttgggctctttcctcttcgctcgccgctactaaggaaatcgatctttctttctcttcctgcagctacttagatgtttcagttcactgcgtcttcctttgattagctatctattcactaatcaataatgcatctctgcattgggttcccccattcggatatctccggatcactgcgtacttaccgctccccgaagcttttcgtagttcgtcacgtccttcttcggctgttagtgcctaggcattcaccgtgcgcccttttctacttgaccttactcaagaattctcttctcggtcgctctacaatctgttctctttgattgtctcggttttttgcttggattatattcagttttcaatgtactagctctttgatcctttttctggatcaatggaggctaacgggttcgaaccgatgacctcctgcgtgcaaagcaggtgctctcccaactgagctaagcccccagagtattttattttcggccagacataactttaactctttttcttcgttatgtcaatgggcctaaatggacttgaaccatcgacctcacgcttatcaggcgtgcgctctaaaccagctgagctataggcccgactaacgcttggcgtttttcaaatctttgaggtactaccctcaaaactaaacaaagtttctcagtgtgcttccgcttgctctggatacttctcttagcattcctgctctccatatccttcgcttccttagaaaggaggtgatccagccgcaggttctcctacggctaccttgttacgacttcaccccagtcatctgccctgccttagacggctccttcccgaaggttaggccaccggctttgggcattgcagactcccatggtgtgacgggcggtgtgtacaaggcccgggaacgtattcaccgcggcgtgctgatccgcgattactagcgattccagcttcgtgcagtcgagttgcagactgcagtccgaactgagaacagctttcagagattcgcttgccttcgcaggctcgcttctcgttgtactgcccattgtagcacgtgtgtagcccaggtcataaggggcatgatgacttgacgtcatccccaccttcctccggtttgtcaccggcagtctcattagagtgcccaacttaatgctggcaactaataacaagggttgcgctcgttgcgggacttaacccaacatctcacgacacgagctgacgacagccatgcaccacctgtcttagcgtccccgaagggaactttgtatctctacaaatggcactagatgtcaagacctggtaaggttcttcgcgttgcttcgaattaaaccacatgctccaccgcttgtgcgggcccccgtcaattcctttgagtttcaaccttgcggtcgtactccccaggcggagtgcttaatgcgttagctgcagcactgagaggcggaaacctcccaacacttagcactcatcgtttacggcatggactaccagggtatctaatcctgttcgctacccatgctttcgagcctcagcgtcagttgcagaccagagagccgccttcgccactggtgttcttccatatatctacgcattccaccgctacacatggagttccactctcctcttctgcactcaagaaaaacagtttccgatgcagttcctcggttaagccgagggctttcacatcagacttattcttccgcctgcgctcgctttacgcccaataaatccggacaacgcttgccacctacgtattaccgcggctgctggcacgtagttagccgtgactttctggttgattaccgtcaaataaaggccagttactacctctatccttcttcaccaacaacagagctttacgatccgaaaaccttcttcactcacgcggcgttgctccatcagacttgcgtccattgtggaagattccctactgctgcctcccgtaggagtttgggccgtgtctcagtcccaatgtggccgatcagtctctcaactcggctatgcatcatcgccttggtaagcctttaccttaccaactagctaatgcaccgcggggccatcccatagcgacagcttacgccgccttttaaaagctgatcatgcgatctgctttcttatccggtattagcacctgtttccaagtggtatcccagactatggggcaggttccccacgtgttactcacccatccgccgctcgctttcctaacgtcattaccgaggtaaatctgttagttccgctcgctcgacttgcatgtattaggcacgccgccagcgttcgtcctgagccaggatcaaactctcattttaaaaagtttgaatgattgctcattccttatttaagatctttgtctcaaatttattgcttgcgaattgacttcgcttcttgtttgggtttttacacccgcacacttttagcgaaactttgttcagttttcaaagtactacctctgtcttgcttttttgcaaagcagacagcttttatattttatcaaaccatcatttctttgtcaagaacttttttgatttgttttttcgtcttactcaagctttttctgctttcacctgacgacatttaaatatattaccagcttatttacttctttgcaagtacttttttctttttatttgttttctttccttgcatgtctgtttttaagctctcgtcgcatctctcgaagcgactttattaatttaccttattttctccgctttggcaagtcttgctcttcgttcgggttctatgtatttttatgaaatatttattctgattatagtaattacattagtagaatctgctttcaattatagaaatatcactttaactcgttaaaaactttataaatctcgaactatatttttaaaggtaagcaaaaaatatttttattttttgttattaagctgtattttctgccaaaataatatttaatttatcattttcactaataacaagccacaatttaaaaactatttttcaaatttctcttatgttgctgtaattcatagttacctttgtgcgacatattgacacatattaactacttcagaatgaatttcctagatcttggtacttagatagaggcatacttatcatctgttcacttagaacaaatagtcaacacagcgcgctccaacatacgagatcaattaaaagtccctgtcatctgctttgcacacatagttttgttataactgtttatccaaattcagatcaatacgaattgtctgaccggtttaattatattttagaagtaaaaaatagcattgctacctaattacaaagagatacagtaataattaccagctattttttcaatcttaaccgtactaattctgatcagaattttgttaactcatttttgtataattagcctactacaatcagaaccccaacagattcctagatatagattgcttacctaattttactgtcgttgaatatttataaacgcgtggtgctagttaataaaaaagtccaatcggattagactcaagttgtaacttaaattaaatagaaaagagtccgatctaattgaactatctcaagcttaatcgtttttctcaccatttacaagttagctttgctcggttaaatgtaatttgtcgttctttgtacaagctttgtgctcctgatgaattgaagcaccgtaaaaatgttgatcaggttaaaatttctgacagctccatcttagcgatgcttatttggcaaactgaaattggtatcgaatctcaaagaagattttgtaaattctttgtcggtttgtctcattctcgctttaatcgtcgggcacgaatgcttttgcctttaatgcgctgtatccgtcaagattggaatcaagaagtaaaaacagctggagaattcttaattattgacagtttcccagtttgtcagcctatccgcaactatcgcgtcaagatctttcgtggcatagctgatatcggctagaaagccactaaaaaaatctattattacggcttcaaggttcacgcgctagtaagcgatgatggctatgtacttgaactaaagcatcagtgcatgatgccaaagaaacgacagaattgatgattaatgctcatccaattaaccattatcttttaggcgatgaaggctacttaggaaaagacttaactgccgagttaaaaggtatgggctatgtcctttggacaccatatcgaagaaacatgaaaggcgctaaaaagcataacgatcatcaactgatggcaattagaagaacaattgagagcgacttttctttgcttagctggttttcagcagcggctagaaatagccattttagcttataatatggcatattgcctagaacgatttaactagcaccacgcgtatttataataatctatctacgcgtggtgctagttaaatcgttttagttaataaaaaagtccaatcttgttagactcgacttgtaaatagtaataatagaaaagagtctgatctgattgaactgccttaagcttaagcgttttagccaccatttacaagttagttttaaagatttagtgataatttgtcggcactggtatcgtttgtatgcaccggctgagtttactcatcggcgaaatattgatcaaattaaaactacggacagtctgattttggctttacttatctggcaagctaagacaggaattgaatcacaaagaagattctgtgaatgtttcaattgtttatcacactcacgttttaatcgacgttcacgtcagctattgcaattgatttatcagatacggcaagaaatgaataaaaaggttgacctgaatggacagttcttgatcattgacagctttccggtacctgtttgccaaccaattcgcaactatcgtgctaaaatttttcgcggttatgccaacattggttataaggccaccaagaaaatttacttctatggtttcaaagttcatgtcattgttagcgatgacggttacattcttgattatgtcgtaacaaaagcatcagttcatgatgccagggagacagttgaactgatggaaaatacccatccatctaattactatcttcttggcgacgaaggctatttaggcaaagaactgcatcaacagctaaaacaaatgggttatgaactttggacaccatatcgtaaaaatatgacaggagctaaaaagcacaatgatcatcaattgatggctattcgcagaacaattgaaagcgacttttcgcttctgacctattacaatgccgagaacaatcgagcacgtagtctgataggctttcaaagccggttggaaattgcaattttagcttataatttggcttattgtctagaacgatttaactagcaccacgcgtatctctctataagatttttatgcacttaaaaagagagcatagcctccgtaatcaattcaattaagcttgttaggaattttactatgtcttctattaatgattatattaaatttgaccctcaagtcatgcttgcttagcctaattagccttttaacatacccaaaaggcacaaaaaagaagtcttccgcttccttctcccctttactccggctgtcagactcgaactgacgacatcttgattaacagtcaagcgctctaccaactgagctaagccggaatattaaaaaagagcacggcagcttcctttcctcgcaggcagttgcccaccaactactttcggcgttaagaagcttaacttctgtgttcggcatgggaacaggtgtatccttcttgctttcgccaccgtactcttttgagcttttacactcaaaactaaacataatccttctcgcaaaaaaccttccagtttgcttcgctttggtcaagtcctcgactgattagtactggtccgctccatccttcacaggacttccactcccagcctatctacctcatcgtctctgaggtgtcttactgcttacgcaaaggaaatctcatcttgaggggggcttcgcacttagatgctttcagcgcttatcccttccgcacatagctacccagcgatgctcctggcggaacaactggtacaccagcggtgcgtccatcccggtcctctcgtactaaggacagctcctctcaaatttcctacgcccacgacggatagggaccgaactgtctcacgacgttctgaacccagctcgcgtgccgctttaatgggcgaacagcccaacccttgggaccgacttcagccccaggatgcgacgagccgacatcgaggtgccaaacctccccgtcgatgtgaactcttgggggagataagcctgttatccccagggtagcttttatccgttgagtgatggcccttccatacggtaccaccagatcactaagtcctagtttcctacctgctcgagttgtctctctcgcagtcaagctcccttatacctttacactctgcgaatgatttccaaccattctgagggaacctttgagcgcctccgttacactttaggaggcgaccgccccagtcaaactgcccacctgacactgtccctggcctggcttacaggtcgaggttagagcatccttcaaacaagggtagtatcccaacattgcctccaataagactagcgtcctatcttctctggctcctacctatcctgtacatgtttaaaagatactcaatatcaagctacagtgaagctccatggggtctttccgtcctgtcgcgggtaacccgcatcttcacgggtattataatttcaccgagtctctcgttgagacagtgcccaaatcattacacctttcgtgcaggtcggaacttacccgacaaggaatttcgctaccttaggaccgttatagttacggccgccgtttactggggcttcaattcaaaccttcgcttacgctaagctctcctcttaaccttccagcaccgggcaggtgtcagcctctatacgtcatcttacgattttgcagagacctgtgtttttgataaacagttgtttgggcctattcactgcggctaaccaatctcttggctagcaccccttcttccgaagttacggggtcattttgccgagttccttaacgagagttctctcgctcaccttagtgttctccactcgactacctgtgtcggtttgcggtacgggtatgtcatctctggctagaagcttttcttggcagtgtgattaccacaccttcgctacttttaattcactcctcttcacaactcgtgttgctggttagaagcatttgactcttaaccgcacttgttgcttgaacatcgttccatcgcgatgcgtgcttcacctcctgcgtccctccttcgctcttaacgatttgacacagtacaggaatctctacctgttatccatcgactacgcctctcggccttgccttaggtcccgacttaccctgggcggacgagcctgccccaggaaaccttagtctttcggcggataggattctcacctatctttcgctactcataccggcattctcacttctaagcgctccattgatcctctcgattcaacttctccgctcttagaacgctctcctaccacgtgctctttaaaacacatccacagtttcggtactatgcttagccccggtaaattttcggcgcagcgccactcgactagtgagctattacgcactctttgaatgatggctgcttctgagccaacgtcctagttgtctacgcaactccacatccttttccacttagcatagatttggggaccttaactggtgatctgggctgtttccctttcgactacggatcttatcactcgcagtctgactcccgtgtatggatatctggaattcgtagtttatctggattcagtaacccctgacgggcccctagtccaaacagagctctacctccattatcctctccacgaggctagccctaaagctatttcggagagaaccagctatctccaagttcgtttggaatttcaccgctacccacaactcatccccgcaatttttaacttacgtgggttcggccctccagtgcgttttaccacaccttcagcctggtcatgggtaggtcacttggtttcgggtctacgtcacctaacttttcgccctattaagactcgctttcgctccggctccgtcttttctgacttaacctcgctagataacgtaactcgccggttcattctacaaaaggcacgccattgcactttaatgtgctttgactacttgtagacacacggtttcaggttctttttcactccccttccggggttcttttcacctttccctcacggtactggttcactatcggtcactaactagtatttagccttgcgagatggtcctcgcggtttcaaccgggattcctcgtgtcccggcctactcaggattctgctaggcgtgcttgagatttcgcttacggggctctcaccctctctggcttaccttcccagataattcaactatctcttacactgccacgtcgcagtcctacaaccccaaatgataaatcacttggtttgggctctttcctcttcgctcgccgctactaaggaaatcgatctttctttctcttcctgcagctacttagatgtttcagttcactgcgtcttcctttgattagctatctattcactaatcaataatgcatctctgcattgggttcccccattcggatatctccggatcactgcgtacttaccgctccccgaagcttttcgtagttcgtcacgtccttcttcggctgttagtgcctaggcattcaccgtgcgcccttttctacttgaccttactcaagaattctcttctcggtcgctctacaatctgttctctttgattgtctcggttttttgcttggattatattcagttttcaatgtactagctctttttgaggtactaccctcaaaactaaacaaagtttctcagtgtgcttccgcttgctctggatacttctcttagcattcctgctctccatatccttcgcttccttagaaaggaggtgatccagccgcaggttctcctacggctaccttgttacgacttcaccccagtcatctgccctgccttagacggctccttcccgaaggttaggccaccggctttgggcattgcagactcccatggtgtgacgggcggtgtgtacaaggcccgggaacgtattcaccgcggcgtgctgatccgcgattactagcgattccagcttcgtgcagtcgagttgcagactgcagtccgaactgagaacagctttcagagattcgcttgccttcgcaggctcgcttctcgttgtactgcccattgtagcacgtgtgtagcccaggtcataaggggcatgatgacttgacgtcatccccaccttcctccggtttgtcaccggcagtctcattagagtgcccaacttaatgctggcaactaataacaagggttgcgctcgttgcgggacttaacccaacatctcacgacacgagctgacgacagccatgcaccacctgtcttagcgtccccgaagggaactttgtatctctacaaatggcactagatgtcaagacctggtaaggttcttcgcgttgcttcgaattaaaccacatgctccaccgcttgtgcgggcccccgtcaattcctttgagtttcaaccttgcggtcgtactccccaggcggagtgcttaatgcgttagctgcagcactgagaggcggaaacctcccaacacttagcactcatcgtttacggcatggactaccagggtatctaatcctgttcgctacccatgctttcgagcctcagcgtcagttgcagaccagagagccgccttcgccactggtgttcttccatatatctacgcattccaccgctacacatggagttccactctcctcttctgcactcaagaaaaacagtttccgatgcagttcctcggttaagccgagggctttcacatcagacttattcttccgcctgcgctcgctttacgcccaataaatccggacaacgcttgccacctacgtattaccgcggctgctggcacgtagttagccgtgactttctggttgattaccgtcaaataaaggccagttactacctctatccttcttcaccaacaacagagctttacgatccgaaaaccttcttcactcacgcggcgttgctccatcagacttgcgtccattgtggaagattccctactgctgcctcccgtaggagtttgggccgtgtctcagtcccaatgtggccgatcagtctctcaactcggctatgcatcatcgccttggtaagcctttaccttaccaactagctaatgcaccgcggggccatcccatagcgacagcttacgccgccttttaaaagctgatcatgcgatctgctttcttatccggtattagcacctgtttccaagtggtatcccagactatggggcaggttccccacgtgttactcacccatccgccgctcgctttcctaacgtcattaccgaggtaaatctgttagttccgctcgctcgacttgcatgtattaggcacgccgccagcgttcgtcctgagccaggatcaaactctcattttaaaaagtttgaatgattgctcattccttatttaagatctttgtctcaaatttattgcttgcgaattgacttcgcttcttgtttgggtttttacacccgcacacttttagcgaaactttgttcagttttcaaagtactacctctgtcttgctttttttgcaaagcagacagcttttatattttatcaaaccatcatttctttgtcaagaacttttttgatttgttttttcgtcttactcaagctttttctgctttcacctgacgacatttaaatatattaccagcttatttacttctttgcaagtacttttttctttttatttgttttctttccttgcatgtctgtttttaagctctcgtcgcatctctcgaagcgactttattaatttaccttattttctccgctttggcaagtcttgctcttcgttcgggttcttcacgatacactaggtagtgttgtaatatatttttctttatctttgcattaaattaaaaagtattttattctatcaaatctaattattcgaaaattgtgggttttcatccctgaaaccatgcaaaattaatttaaatttttttactttttttgcaaaatcacgtaaatattctactattcaaatcagaattccattgcaatgatcaatttcatgctgaatcgtttcagctataaagtcaccaaaagtttgcgttactgtttctaactccatattctgataagtaacagtaatttcttcatagcgctgaacattacgctcgccttctagtgacagacatccctcactagcaagatacatctgctttttttgaataatacgcggattcagcattacaaatggaagcgggccagcataaaacgcaataatttgtttagtctgaccaatcatatttgcagccagccccgcagctttcccacgattagctagtagcgtatcacgcaagtttatcgcaacttgtaaatcatttttgccagctaaatcagatttttgtcttaaaaatagccgattgtgaattattttttgtgcagtcatgttttcttcctttatcattattatttctattcattataattgaaaacgaggtgaataaatattgaataatcaagcaagttttaaactctctccttaccatcagctcaaccaagagcaatcacttctcgtacaaaaaattttacatttttcgattacacattgcagcaataaaaatcatcctgctgttttcactatttatggtgaagcaggtactggtaaaagtgtagtgctttctgccctttttgatcagttgcaaaaattaaaccaccaaacaggcagccaactgtataaaactcaaaactactttttagtaaatcaccctgaactgctaaaagtctataagcagattgctgggccgattaaagaactatataagaaaaattatatgcggccaacttcatttattaatcagatggacaaaaaacaaaccagtgctgatgttgtcgtcattgatgaagcacacttgctcttatctcagcctgatcactacaacaacttttatcacgataaccaattagaggaggttattaagcggtcaaaagttatcattttggtatttgatgaaaaccaagttttacgaatgaaaagcttctggacacgtaagcgacttgaagcaattactcatcattatccccacgaagactatcaactacatcatcaatttagaatgatggcaccagatagtctaatagaatggtttaacttttttacacataataaattaatgcccttaaaaaaagaaatgtggcacaactacgactttcgtatttttactgatgcagaaaaaatgcggcaagaaatcgtcaagagaaatcaaacagacggcctggcaagaattctttcaacttccggctatccatctactcttgatggtggcaaacattacattaaagaagggaaatttatgctgccatgggatcaatacaactacacatcaactccttgggcagaaattcctacaacaatcaatgaagttggttctatctatacttgccaaggttttgacctaaattatgctggcatcattatcggtccaccaatcagcctgattccccgcaccaatcaacttaaagttaatttagacaaaattacagatgttgagatgttcaaaaagcgtaatgatctaaccaactcaaaagaaaaaatagaatatgaagagaagatggtcatgaattcactcaacgttctattcaagcgaggaatccgcggtacctatttatacgctcatgatcccgcactcagagcaaaattagccgcactttttcaacaagctagctaaaaatacgtcttttcaccaagataatagtttgtccgatgcaaagaacgcgctaaaatgtaaacaaaccactttttaagggaggccttttaatttttgaaaaaatcaattattggactagctaccgctgcgctgctaacgacagttcctgcatttgcgatcactgaaccaccacaagttcaagccagttcatactttaaaaccgaaatgcgaaattttgtccgcaatactttggctcaaaacaatactcgcggtagtatcgtcattatcaaaaacggtcagccgcaacaaatcagctatggctacgcttggtacggtaaaaaagttggtaatgggaacgacaacgtagtttatccaactgcttctttgcaaaaagttgttacagcagcaatgataattcagctgatgaatgaaaactggcacactagtcaaaaatttacgcaaaacaccaaaatttcacgttggtaccctaatcttaaaaacgccgataatattactattggacagttaatgacccatacttctggcattcaagcaaccaatactgaattggatcgcggaaaagttttaagtgagaatgacgccatcaattgggctattgataatactaataacggcactcaagggacaccaggaacctacttctacaataataccaactatcttttattagccggaattattattaaaatcagcggacaatcctacgaaaacaatttcaataatcgcatcattaacaaattagggcttgctaatacattcctttatcaggatattcctagttggaaaaccgatcctatctcttacgtctggaataatggtaaaaattaccaagacgctgaatacgttaaaaagactcttgcctcccagcttccaggcgcaggcaatatgttcactaccccaatggattattacaagatccagcttggcttaaccaatggtagtatcttaagcaaatccgatttctattacttaactcatcttaaaagtgcaaccactaattattctggagggcttcatttagatgatgaccatactaaatctgcttatggtagcttaagcaacactcattttggtaattggatcaaaatgactacagataatcgatatggaataattatgtttttaaaccaggttagcggtgatgaaactgctcagaaaaatatcgggactaagattctagatcacatcaagcctagaatgtttgataaggataataaccaagatgaccaagatctaattaatattagcggcaattaaaaaagcttttcctaagcggaaaggcttttttggtctattcaaataataactcatgcattgactcactcagtggatgtttcaacattaagttcatccctacagctggctttttcttaacaccgagcaattcttcgcgaacagaatcagcttgaatctttgccttgcctaaataaaagaactgcttaccatctgcatcgcttcttttaacaaatatatgcaaattcatccctcgcgtattaagcaaacgctgtacctcatcagaatctaaatgccgtggtacccgagtataccagcgcaaactgcgcccatcagccaatgtattacgatacagagcattccgcttttcatgatcatctttatgataagtgatgaagattggtgtgtcctgctcaccaacacgatagccatacatcggggccgaaacatccttaggccagttcaagagtcgacaagcgtccttacgatcatattgctgatataaagtaaattgacgctgattatcatattcctgatttaaggccaaaccagttttaatagcatcaacaaataaattcttaaaatcatgttgatctagggcagagcgtagagaaccattcaattgatagtcaaataaattgctacgttcaactaacggcaatttaccatattgtgcttttttggtagtctttccctgcttaatatcaaaaaaatctagcgataaaatcgcatcaacagaagctaacaattcatcatttacataagcatggtgtcgtttcaattgagctagataatcttcttgcttaacaatatcttgttcaagtagcatctctaacaaaagtaactcgtgaattcttttaccattaagtaattccttagtcacaaaagacagcacttcattttcatattttgataaattaacgtcttcgcccattttacccaaaaagtcagcatagcttgccaagccatgattttgtgcaaaaacaatcggtgcaactgagccatattgataaaaatcaaatagtagcggtacacgccctagtttgttcttgagatcatggtaactctgccgcaattcacgcatcccatcaagcttgacactatcaagcgaagccaaaattttttcactggcaattttactaaagttaatcgttgaaacatcaataaagcttggcagacgcgtttctcgtttagcttgatctttgcttcgagaagtatcctgattcagtgccaacggaatcatgtaattgtttttataattgccgataaaatctagcacaacggtaaaatctttgccaggatatttacgaagcccccggcctaactgctggataaacactatgctcgactgtgtgttgcgtaacatcacaatttgattcaaggcagggatgtcgattccttcgttaaacaagtcaaccgctacaatatactcaatctcacctttaactaaagacgcaaccacttcattacgtcttttttcattatcctcattggtcaatgctacagcgggatgtcctttttgactaaaaagccgagctaattcacgtgcttcatcctgtcgactgcagaaaaccaagcctttagcctttgttccacaatagccgtaatagtctaattcctttaaaacatagtctactcgagatgtagaagctaggtagcgtaaatctgttgtttcatcaatcactactccgtctgcttcataatcctggacacccacataatgaaatggcgccagcatcttctcttccagtgcatcccgcaaacgaatttcatatgccaaattgtagtcaaaaatctggtaaacattttgctcatccattcgttcaggcgtagccgtcattcctaaccaaaaattgggcttaaaataatgtaaaaggcgctgatatgaaggtgcagctgccctgtgtgcttcatcaatcaagatataatcaaattcatcgctattaaaattagccagcatctcaggttgacttatcgtttgtaccgtcgcaaataaatacttggcctgtaaattgtgcctatttcccgttaataagccataatccgatcttggtccaccgattacacgataaaaactttctaatgactttttagcaatttgctcacgatgcacaatgtataaaaaacgccgcggctgatatttcttaacagcaaaagcacctaaataagttttccccgttcctgtggctgacactactagccctcgtttttcaccacttgtaactagtgcttctatctgttttaaagccgctttttgcattttatttggtaaaatttttgtctgatgccgatcagtagcaactcgctcaggctttacccaatttttacgataatctgttagccaggctgaatttaaaacaaaactatcctgtttcaaatctgcaattttatccactaattgagctgttaaatctgcttgcttttttgaacttactttcaaagcccactcatagttagccagcagagctgaacgtgtaaaattagcactgccaataatcacagtttgatagttttcatgatcaaataaatatcctttagtatggaaacctgccttattagcaatacgaacttctaaattaggaatcttttgtaattccgtaaaaacacgcggattgttaaaacccaagtaatcaccagtaataatcgtgccactaattccatttttcgctaaatctgccattatcaccttaaacggaactagcatgtcttgcgtaataaacgcaaccgcccaagtaaaggacttgcaactatacaattcctggcgcaaattctgccagattctctcttgctgattattagctaatattttaggacctaattcttcacttcctaaataattttgatcaacaaaaccatttaatattgcatccctcatcgcatccgccattttattcacctctctcaaattctactaaaaaagcatccgtcttgaaaaacgaatgcttcttaattctattgtgattgccatttttcatgccagcgatacaaaataagtggcaaaatcgacacaatggcacacatgccgattaaggtccaaacataaacgtgacgcaaattgcttggcgtgccttgtgctggaacaaaagttacaaagaaagctataaccgtgatgattaatgcaagcaccgcaattgcaatactcaaattagggttcttgctcatgtaatacatacggtgataatcttcatgctttcttttcaaaaccatgtaagcaatcaacataatcatataaaccatgagatattgcgccgtcgttgcggccaatgaaacgttaaacgcaaaatctgcatcggcaccactggtaaaagtaatcaataatgcagaaatggtaacgatacttgattgtaaaaccataattcttaatggcacgccgtgcttagtggttttagcaaaaaacttaggcatatagccctctttagccgcttcatacattccctgattaggaccagcaatccagttgcctagctcaccaataataccgcaggctaacattatacccacaattttttgcaacagatcaccaggtagcccgattgacgttaacagcttgccataggtataaacaaagcctgtactgttctctatttgatccttaggcacagtcattccaattgccatactacctagcaagtcgaagcagattgcagtaacggctaagccaagcataacttttgagtatgacttgatgtggtccaagtttttaacgtgcggtgcagaagcttccccaccacaaaaggccaacataaatgggacaaaggcaactaatgtattaccattcaatttatgtggaattacagtattccagttaatcgtcatatgcaagggatgcccctgaatcacatatacgaagaatgaaataatcaataaaattactggtgtcgcaatccccagaataaacagccattcagcgattcgaccaatctttctaacaccaattacctgaatcgctgttgctccccacagaataaccatcattaaaatgaagcgtacgattggcgtggtgttgaaccaaggtgtcccaaatgtgatagacaatgccccaatgatcacatacatcatcgtatccataccaacagtaatatgaatccattgataaaacattgctgtccagcctgttttgtctccaagagatcctttcacccaagtgaagattccgcctttttcccagccatcaattgaggccatttctccagccatttgcgtaatcgggataaaccaagcgattccagcaattaacaagtaaaacagtgccgttgctccagttttaccaaatggtgcgagttcatcaacggaaataaccattgaactagtcatcgcgaatagcttaaatgctgtcagacgattgtacttcagatcctgctccaaagcccaatcttcttttttctcgttattcaaagaatttcaacccctacttctttttcaaaataaaaacatttcaaaaagaaattatactagggcttgcttcaatttaaagatttatttcaagcaaaattgggcagtggtctgctcgtttgcctgtatcgatcatctctgagcggaccaccttatcaacaatgcgattgcttactagccagtaatcaattctccagccagagttgttagccttagcggttctgacacgttgagcccaccaagaatatacgccagtaatctcaccatgaacttttctaaaggtatcggtaaagccagcattgagcaaattggtaaagtcgactctttcttcatcagtaaaacctgctgagtgatgattattttcgggatgcttcaagtcaatctcggtatgagcacagttgtaatcaccactagctaaaactggctttttttcatctaatttttgcagatattcaatatacttttggtcccaaacttgacgttcagctagtcgctttaaaccactgcctgaatttggcgtataaacctgggtgacaaagcatttatcaaattccagtgtgattatccgtccctcatgatccatcggctcaggggcgccaataatcggctcagacactgcaggagttaatcctttcttataaagatacattgtaccagcatagccttttctagctggttcttctgaagagcgccaaacatagtcatactcagggaacttttcagccaacacttctttatgttttttagttggcccagttgcacgcagcttagtttcttgaatcgcaataatatctggattggcatcatgaattttagttaaaacttgccgcgtttcttccgccctagctgaagtaccagtcagagctgcatttaatgaatcgatattccatgaaattaagatcatttttcttcccctttgttttagttctcaagtttaattataacgaaaaaaagaaaaaggactgatttagatgacttttctaaaccagcccttttaagggagttgtgttgaatgagaataacgagatttttttacattagcctactcatcactaatgttgcgaagataaattatcaagattaacaaaagattcaacgcaagagatgttgcagggggtcttgactctttaccttcgcaaaaaggggatggacttattatcaatcttaactttcgcggttgcataggggacaaccagcaaaaagcaatacccaatgtatgaattaataaaggcccaataggatgtattaataaggaattagaagatttgttaccttcttacaattcatctctatttgatgcgttgtatttttgttatgagtatataatatcagctttatgacaatgcgtcactatttgctttttgtctttagaaatccttaaacttttagacaaaaaagcaagctagctcctatctgagtcaacttgcttcttagtaaacagaaattagatattacaaattaagatctatgcttcttgctatctgctaatcctaataagcttccagcagctgcaatagctacaccgatagcagtcaaagcaacgttatccttcttccccgtttgtggcaaagtagatttttgctcactagctactgtcttcttgccaccattatcctttgctggtgtcttagtagcatgaggagttggtgttgttggcttctgctctggctttacaggcggggtaactggggttgctggattatcgcctggatccactggtggagtaactggggtatctggagtaccaggattattagccttatagttaattactactttagtatttggagtatctggagtagttttccaagtgtaagtcgtgtcaggaatcttgtccttgatatcgttagagttagtaactacagtacttgggtctggaaacttgtcaccctttggtacgtagataacgtctggtacatttggtgcaatgacagttacaggaacagttgcggtactcttagtaccgtctgggtaagtcttgtctttgatttgaaacattatcagcttctttgactgcatctacatctattttctcactactctgtttttgaacaactgagctggtttgctcagcatctctacttaaatcatctgcatgaacagcatgaccaccaaaaaacataaaggtggtcccgattattacagaagcaacaccaattgtcagctttcttaggctgaaatgctgttggctttctcctttaaaatgcatattcaattttcctccgctatgtttgtttctctacttaaagtccattatataacctgggttatataacgaaaatgcgtctcttatacaaatccatatactacctttaactaatattgctatatacaaaaataattttcatatctatgggattgagattaggtaacagttaataatagttgcaatttttaggctataaactttttttgaaaaaattgcaacttttttgctcagagtaaaacttgacttttatttttcttaaaatctatacaaaaaaatggttcttttgtgttttgttgagcaagtaaaagcgtataatgaggactggtcatactaataaattttacggaggttaaatttatgacaaagatttttgcttacgctattcgtaaagacgaagaaccattcttaaacgaatggaaggatgctcacaaggatatcgatgtagattacactgataagcttttgactcctgaaactgctaagttagctaagggtgctgacggtgttgttgtttaccaacaattagactacaccccagaaactcttcaagcattggcagacgctggcgtaactaagatgtcattacgtaacgttggtgtcgacaacatcgacatggacaaggctaaggaacttggctttgaaattactaacgttcctgtatactctcctgacgctattgctgaacatgctgcaatccaagctgctcgtgtattacgtcaagacaagcgtatggacgaaaagatggctaagcgcgacttacgttgggcacctactattggtcgtgaagttcgtgaccaagttgttggtgttgtaggtactggtcacattggtcaagtatttatgagaattatggaaggtttcggcgcaaaggtcattgcttacgatatcttcaagaacccagaactcgaaaagaagggttactacgttgactcacttgacgacttgtacaagcaagctgatgtaatttcacttcacgtaccagatgttccagcaaatgtacacatgatcaattacgaatcaattgccaagatgaaagatggcgttgtaattgtaaactgctcacgtggtccacttgttgacactgacgctgttatccgcggtttggactcaggtaagatctttggctttgttatggatacttacgaagacgaagttggtgtatttaacgaagattgggaaggtaaagaattcccagacaagcgtttagctgacttaattgatcgtccaaacgttttggtaactccacacaccgccttctacaccacccacgctgtacgtaacatggttgttaaggcatttgacaacaacttgaagatgatcaatggtgaaaagccagattctccagttgctttggacaagaacaagttttaattaacctaaattaagacaaactaaaagacttgagaaaaattacttctcaagtctttttttgtactattttactgtttacccttaaatccgggttctaattccaccttaataacttcaccacttgaatagcaacgtgtagaatttcgacaactaataactaaccgtccttgatcatcaattgtcactactcgacctgttacataataatgatttattttcaaagttataactttacttttcagataagaaattttgcgatactcgtctaaaaatttattattttgatatgtattagcagcctgcacaacagctcgaattaactgctcattcatattctcaaaagcataatcagcttgtacaatactgccgacatgatttgagatattttttgggaaagatgccgtaaaaatattcacccctattcctattaccaaacctaatcctattttttcggttagaataccagctacttttttatcatttaaataaatgtcattaacccattttaaacgaaattcatacgaaggaaattgttcttgtagtatatgaactaccgctaccccaatagctattgttaataagcctgcatgctctaatttaaacttaaaattaggaagcgcaatacttaaataaatacctgttttagctggtgaataaaaggagcgtcccctcttgccataacctgccgtctgttcctgtgctataaatgcagcaatttcttgagctttatttgctaaatatttttttgcaagatcttgtgttgaagtaacctttcgatatttgtaaatttgcattagcgtaaatgtacacctttgtctacaaaaattacatctccagtaatcccactagccaaatcgctcatcaaaaaagcacaggtattacctacctcttcttgtgtcacattaacaccatcaacagtcttactcttagaaatcttcaataatgatgcatgaccctggattcctgagacagccagagtgcgcatagctcctgctgaaatagcatttacccgaacacctttttcacccaggtctcgcgctaagtaccgcatttccgattccaaagcggccttagcaatccccatagtattgtaattaggcaaggcacgttctgatcccatataggttaaagtaacaaggcttgcaggattatttaagattttgattccagcttttgcagcagccaagaaagaataagctgaaatatcaactgcttggctgaatccctctcttgtggaatttaaaattgagccacctaattcttctttctcagcaaatgcaatcgcgtgaacaatgccatcaattttgccaaaacgagattgaatcaaaccaaaagcctgtccaatactctcatcacttgccacatcgcattcaatcaggcaatcttcatcagtaactaatttgctaataaatttctttaatcgctcattttggtaagtataaatgatttttgctccctgtttttccattgcttgagcgcatccccatgcaatagaccgattattggcaacacccattaccaagattttctttcctgctaaaaatccactcattttttacctctaaaactttctaaacctttcgtatcgcttagcaagcaattctgcctcggataatttacttaatttgtttatctcactttgcagcttttctgctatattttgacaaacctcttgatgattatccggttcggcgatgataccttcgatcacattcatcttgagtaaatcatcgggcgtcaatttcatgacttccgccgcttcacttgctctttttacatctttccacaaaatagaagcaaagccctctggcgataaaacagaataaatactattttccaacatccaaacttcatctccgcaggcaagcgctaaagcaccaccagagccgccttctccatacatgaccgtaataataggagtaggtatttgactaactttaagcaaattttgtgcaattgcctgtccttggccgttttcttccgcacttttaccaggataagcgccagctgtatcaacaaacaaaaaaacaggtcgcctaaacttacctgcatcttggattaaacgcagaactttacgataaccacctggttcaggctgcccaaagtgtttttgaattctttctttaagtaaatgtcctctgctagttgtaattactgttactggctcttgattaaaagtagctagcccacctactatagcaggatcatcagtaccacaccgatcaccatgcaattcaaaaaaatcgggaaaaagaagtttgcgtatctcatgaccagagatatgactttcatctcttgcagctttaactatatcaattgcatttttagtcatgatagccacctaccttgattaaccattcaatgattcttttttcctgtgagcgtctaacaatatggtcaataaaaccatgattcaaaacgttctctgcatcttgtaaatctgccgctactttttcatgaatagtctgttcgattactcttttaccagcaaaacccactatagcatgtggttcagctataataatatctccttgactagcaaaactggccgtcaccccaccagtagtaggatctgttaaaactactaaataaaaaagacctgcttgactatgcctagctactgcattagataccttgcccatttgcattaaagcaagaatcccttcttgcattcttgctccgccagaagccgcaaacagtacgactggtaaatgctgaagcgttgctttttcaaacaaacgcgttaatttttcaccagtcatttgaccaagcgatcccataataaaagttggatccataatagccaaggcgaattgcgtttggttaatcttagctaagcctgtccaaactgattcttttaagccgctaattttttgagcatgtttgatcttcttttgataatcggggaattttaaaggattcgaggactcaatatccttatcccattcctgtacttgatcaactaaccacgataatcttttttttgcagagattctaaagccgtaaaaacaatatggacattcatagaatttatttaattcgttcgcaaatatttcatgatggcatttggggcacttgcgcagcagtccatcaggtactcgatcatcagccgctttatttgctttaatatgtgtatcagtaggagtatttttatgcggaaatagtttcatttatttcactcctccattgcggcataaagccttgttcaaggtaagtattgttaaagtcacctttaataaaagttggatcatttagtatatttaaatgaaattcttgattggtagtaataccttgcagaactatttcttcaagtaagcgtttcatcttagcaatcgcttctttccgtgtattgcccaaagcaactaccttagctaacatagaatcatagtaaggagaaatttgttgtccctgatataaggcggtatcaatgcgcatccccggattgccaactggtaaatataagtacgaaactttaccaattgatggcataaaattatttgctggatcctctgcattaattcgacattcaattgcatgacctttagcccgtaaatctttttgcgtaaaaggcagtggtcctccattcgcaacctgaatttgtgctttaactaaatcaacaccggttaccatttcagttacagtatgctctacctgaatacgcgtattcatttccataaaataaaaatgatgatcttgatccatcaaaaattcaattgtaccggtattaacataatttgcggctcgggcagctttaaccgcaacctcacccaattctttacgttcattttccgtaattaaatcgcaaggactttcctctaaaactttttgcttatttcgttgtaaagagcagtcacgctcagggaaataaaccgtatgaccgtacatatcacgaaaaatctgcacctcaatatgctttacattttgcattaccttttcgagatacattcgatcatctccaaaatcatttttagcttcactttgagcagccgctaaagcttcggccatttgacttggatcagttacttgtctaattcctttgcctccaccgccagctgttgctttaatcaaaactggataaccaatttgagcagcaatttttttagcttcttcagcatttttaataactccattagatcctggagttacaggaacattgtgtgccatcatcaattgacgcgcatgttccttattgcccatttgatcaatcgtttccgccttggggccgataaaagttaagccacaatcttcacacatttgagcaaattctgcattttcagataaaaaaccatatcccggatgaatagcttgtgccccgatgcctacggctgctgctaaaatatttttaatatttaaatatgactcagtaggttgcgggccaccaacgcaaacagcttcatcagctaattgaacatgtaagctttctcgatctgcagttgaataaatggcaaccgttttaatccccatttccttcaaagaacgaataatacggacagcaatttcaccacgatttgctattaaaacttttttaaacattcattttacctaaccaatcataaacgttagttctgcttgtgcaattttcttattgcctacccacgcttcacctatgccaatgccaatattttttctgattttagttaactttgttgtcaaaactatctgatcccctggccttgcttgaacaatgaaatttgcttccttaattccaccaaaatacgcggttttgccggcaaaatctgccttgctcaataatgcaactgcacctgtttgagccatggcttcaacaattaaaatagaaggaaaaactggatctttagaggaacttgcttgaacaaagctttcaccaaaactaacattatgaactgctttagcttcctgaccaacttttagaaacaagacgcgatctattaacagcataggaaaacgatgaggaataatttgtttaatttcgtcaatccctagttctttactcataaattaatcttccttaacagtaattaaaggttgccctacttcgaccaggtcttcattttcaacttttatctcactaacagtcccggttaaagtgcttttaacttccgtcatcattttcatcgcctcaatcacgcaaattgtgtcgcctttcttaacatgatcgcccacattaataaaggctggttgtccaggtttagcctgcaaataaacaactccaacgataggtgctttaaccggtttaaccttggtgtcaatattctcttgaacaacaggttgagctgtttcttccacttttttagcggtcttttgaacagtcggctgtactgtctgagtaactttattcttgtttttacttaaatagaaatggaaatcaccatcatcaattttcaattcacgtaaatctgaatcttcaaattgattcattaaagcttgtattttttctaagtccattaattctcgctccatttcttaaaagctaaaacggcattatgtccaccgaacccaaaagaattagaaattgcgtactcaatatcttgctgttgattatctttattaactagattaacttcacattctggatcttgcttaaaacaaccaacatttggtggtaagattcctttttctaagctggcaacagtaattacagcttcaatggcacctgcagctcctaataaatgacctgtcattcctttagttgaactaactaaaactgaactatcttttccaaaaacttggttaatcgctttgctttctccagcatcattagcatgtgtagctgtaccatgtgcattaacatatccaacttgactaggatcaatatttgcctgtacaattgcttgattcattgaacgagctgcttcaactcctttaggatcaggagaagtaatatgataggcatcactagtcgtgccatagccaacaatttcgcctaaaattttggcaccgtgattttgagcatgttctaaactttcaataactagtgctccagctccttcccccatcacaaaaccattccggttttgatcaaatggtagtgatgctcgatcaggatccgtactagtagataaagctgttaaggctgcgaaaccagcaattgctgtttcattaatagtagcctctgatccaccagtaattattacctgtgcatcaccttctttaattcgacgataagcttcaccaattgaattagttcctgaagcacaagcagtcacaattgaagttgaaatattcttagcattaaaacggatagagatatttccagctgccatattagcaattaccatcggaataaatagtggtgatactcttttaggtcccttatcatgcatgcgaattacttgctcttgaatagtagtcaatccaccaattccggatccaaaaatcacgcctaaatcttccggggcagtatttttttcatcaatccctgccatttccatcgcttcattagcaacttgaatagcatattgagaatacaaatctagtcttcttgcttctcttttgccaacataatcattttcgtcataatcatcaatttcgccggctacactaattcctgtttcagatgcatcaaacttcgtaattggttttatgccaactttgcctgctaaagtattctgaacaaaattttcaacaccattaccattaggggcaatggcccccattcctgtaattactactctttgcatattgcctctttaaatggtcattccaccatcaattacaattgtctgtcctgtcacataatcattttgcactaagaaaaccgctccttgagcaacttcattagttgaacctaaacgttttaaaggtatctgttccaaaatatttttcttaacacgttcagacaatttttgtgtcatttcagtatctatcattcctggtgcaatcgcattaactcgaatatttcttaacgctccctcacgtgcaattgattttgtaaaaccaattagaccagccttagcagctgcataatttgcttgacccacattgccatgtaagccaactacactagataaattgatgatgaccccggaacgctctttattcatccttttcataattgctttactcaagaaaaaaggtactttcaaatctaaatttaatacctcttcgaaatcagcatcatgcataccaatgaacattttatcttttgcttgacctgcattatttatcaagacatctatcttaccaaataaattccaggctgttttgcctatctcctctaaattgtcctgtgctaaatctgctgataaataccgataatcagcattctctttatccaatgcatcctttaaatctttaggcaactcttgttttcgcccattcacaataagcttggcgccttgcctggcaaatgcaactgccattgctgcgccgatcccttgagttgagcctgtaataaaaacaactttatcctttaattccatgttcttcctctacaaaagtctgatattctgcataattgccaatatggctacactttaagtgacgatctacttgtctagcaaatgaagataacaccttgcctggaccaatctctaaagtttgatcaatttgctcatgttcaactaaatattgaatacatgagccaaaatgcgtagggactgttaattgcttagccataatctcacgccaatttccactaaaaggcagagcagttgtattagatataaccggagttttactttcttgaaactttatatttgctaatcgcttcgtcattttagtttttgcattattaaatagtggtgtatgaaaggcgccgttaacttttagcataataattcgcttagccaaatcttgatctttaatttgcttagaagctaatgcaacgctacatttttcacctgcaataactacttgtttaggcgaattgtagttagcaatataaactcgtttgttttgcttttgcaggccttgaattaaaacttcaatatcattgagtttaggttttaaaatagccgccattccgttttcaatctgatcagcatcttcttgcatataacgagcccgatcactgactaagctcagggtattttctaaatctagactaccactggcatacattgcgctatattcgcctaaagacagaccaaccattctactaatatttagatggggacagtctcttttaagcatacgaaaaattcctatttcaaaggctactagagcaggttgaacattaattgttttatctagttctccattttcatctctaagaatggcaaccaaatcttcctgactagctaaacttgctttttcaatcgtttctttaaatagatcatcgtctaaaaaatcaagtcccattcccgctttttgcgcgccttggccgctaaacagaataccgtaactcattatttttgcttatccatttctgcttgtacaaaatcaactaattggccaattgtttggatgctctcatcagcatctaaatcaagatcgtatttatcttctaactcattcaaaatttcaaaaaggtctagactatcggcgtctaaatcctctttgatgttggtagtcattgtgattttttccggttcaacatctaattcatcttgggcaatttcttgtacatcttttaaaatttcttttttagtcattttttattctcctcgtattaatacttaataatcaatgtagccgttgttaagccaccaccaaagccacttaaagcaatgatttcgcctggcttaattctgtttttctgaattatttcagccagcagaattgcttcactagcagccgctgtatttccatactcgtcaatatttacaccaaatttgcttaaaggctgatttaactttttagcaacttgagtaatgattcgactattagcttgatgcaaaagaaaataatttatttgatcaagttcaatttgtgcatttgaacaagctttcaaaattgaccgtggtacttcatgcgtagcaaaacgatatatctcttgtccattcatggtaaaggctgatagctttttttatttttcaaaatgtcataagaaacatctaaatgacctgcaattaattgatcacctttattaccataagtttttaaactttgtcccaataaatgagtggcattactttgacttaataaaacgccaccagctccatcaccaaacaaaactgccgttgagcgatcagtccaatctagcaatttagataaaacctccgcgccaattacaattgcgtgacgccaattattggtaagcatcatgcttctagcaaggctaatagcataagaaaagcctgaacaagccgctgaaatgtcaaaacataccgccttttcggcagcgattctgccttggacaatcgctgccgtagctggtgtcatattatcaggtgtcatagtcgcaacaactatcagatcaatatcttgagttcttacattactctgactcaataatgtttttgctacacgagttgccaagtccgaagtattttcattttgactaatatgccgccttttaatgcctgttcgtttaacaatccattcatctgaagtatccaagatcttactgagatcatcattagtaacgacatgctcaggcacagcaaaaccagttgctataatttttacatctttcaattttcttctgttaccttaaattccaagtctgctacacaaacatctttatcatcaattaaaacctttgcctgacatgcgtattttttaatggcgttaaccttaattgtcaactgcatccctggcttgaccatctcacgaaagcggcctcttttaactctagtaagaatcaaatctgaccgatcccacataaattgtgttgcctccaccatggcttcaattagcagcacacctggcattattggattctcaggaaagtgcccttgaaaataagattcattagcactcacactcttttgagcaattacttgttgatctttattcaaagttgtaactcgatctaacagcatcaagggagcttgacaatctaacttgctttgaatctcagcagtattcattggcataacttcatctccatgttcgttttttaaaattagtatatctaactattcgatattcaaatcttatcatctctttttttattgtcaacacattacaagttcatatagaactcaaaaattctatttacactaatactaagaacacttctatgtaattaaatttttttcgtccacaaaaaaacagactgaatatctccagtctgcttaagcaatttcaaaataatattagtgtgagttcaaaaactcatccagatttttaaatgcatgataaattgtttgcaattcattctcatctagattttgcaaaaaacttttaaccattcgattatgataagcatgatatgctcggcacactactctgcctcgcattgtcaattttaaatgaacaatacgacgatcttgcttacctcggattcgttcaacatagccttttctaactagccgatcgacagtcacagtcattgtagctcgtgacaaatgcaatttttctgctacttgcgaagtagtaggatgttcatacatagtaatagcatctactgcatgcaattccttaggagtaagatcattgaaacgacttttctttagttcttcttcttcaatccgctgaatcccgtaatatacatgatataaagcatcattaatttcttgatataattggttcataaaagttccctaatttcttgttaagttctaaaatcaattataacattagtattttgtgttttttcagcctaattgtatgcaaaataagatactaaatatttagtatcttattcttgaataatttaccctatacttttcaggacataaaatttcaattgcataaatttatttatatcagaaagcaaatgatgatttagtcattatccgacattggaggaaagaaaatgaaaattggcgaggcattgaagttagaaagaaaacaattaaatctaagtcaaagtaaaatggctggcaacatactcactaaatcattttactctaaagtggaacgcgatatttgtagtattagagcaaatgatttattacaaattttaagtttgcataatattgattactcttctttttttaaaaaggttgaaaataatactaataaaaatcacatatctaaaattgattgtgataatttattacacacagcttactatcaaaaagatttgtcgaaaataacagaattagaaaaaatgctaaacgatagaaacaatagtgaactaaatttggataatattagggcacaaattattattataaaagcagcaatttcaaatactttagcccagatttctaatgatgaaaaacaatacataaagaaaactatattcgaaacagataattggacggaaaatagcttaagactatttgctatttcaatgtccatttttgatccaaatgaaataaattctgttgtaaaaaatattataaagaacacccataatataaattcacttcctgaagaaaagcaaaaaataatatccgcaatcttagttaattatttaagttatttcataaaaaaaaagcaacgtattataaatactaatatagatgcttcagttaaaatactgaattctttaacaattgatcctaaaaattgttttgctaaaataatggctaattactatgaatctattctcaataataaacttgagaaagccaaaacaatatcaaattttctcagagaaaatggaatggatataattgctgataaactttaattcaaaataaaaaaaggtgtcatttttgacactgaactgagacctaaaagttagacacttttaggtctttttctacgtaaagtcaagcataataagaagtttggcttcattttctacgaaactgtcaaatcttttgtgtaaatagttctttctcgtaaattgattttttaattatttatttaatcaaagtaggattctaaggtgtcctgaacctgaccaaagcctttatgaattcgattgaaataacggtcattgtagctcattgcctgaatgccaataaaagcatcaagcgactgttcagttggaaactctgccttaggcttagctttgcgcttgatcacattgttaaatgattcaatcatgttagtcgaataaattgaagctctgatctgcttgggatagttataaaagaccagcagatctggttctatgtctttcaagcttctgataacatggctgtaaaccttgccccatttggtatagaagtcatgcaggacagctgtggcttcttctttgtttgtctgttgatgcacctgtttgaattcgttcatgatcttttcacgatcgtcgacgcgtactttagcgcagatattgcgcatgacatgaaccaaacagcgttgaaaatgagctttaggataagtcctggccaaggctgttttcatgccaacaacaccatcagaaagaaaaagctcaacttgctttaagcctcgggatttcatgttttgaagcatatctgtccagacttcaatgttctcgctaggtgcaatgcagtagtcaatgacctccttgtgcccattaggcttgatgccaatggcaatatagactgcttcacgctcaaatgtttctcggcgcaaaggaaggtatgtcgcatccaaatagacgcagaaaaacttgtcgcttagcttgcgtttgtggtaagcctcaacctttggaatcatctgcttggaaatatttgatacctgagctggactgtaatggctgccatacatcttttcaattagatcggctatttccctggtggtcacgcccttggagtaaagcttgataatcatgctttccaagatatccgagtgctgcttgtagccaggcagcgtgtgctgatgaaattgaccgttgcgatcccgaggcacttgcacttcaattgggccaaattgcgtatcaactttgcggaaataagcaccatttctagagttgccagtattccagccatttctggcatagggatcatagcccagaaaggcagtcaattcagcttctaacaagttattaacagcctgttgtagctctttgcgcaataaatcatttattttgtctggattgaatagagcttgagcaaaatctttggtaaaatcattcatgaaggagttcttctttctgtatgtgtttttttgttcaaaccaatcatacgagaaaggaactcctttttctaatgtttaaagaaataaatttaaggaatcattcatccttacacaaactattttacagtctcttgttgatagttatggtgttccatacccattaatattaagaaaagcgttaaaagacatcagacaaggcaaagtagtagcaattccaccagaaatttcaatgggactagggccacaacatactgtaaatttattaggagcacgtgtttcaatgccattaggtagctcttgggtaagcaataaaatgcaagttccaattattatcttacatactgaaatgacagaaaaatacaaaatcaagatcactttcgaagatccaatttatccgtcaaaaattcaaaacagagcaagcattgttaatgagtctaaatatgtatttaaaaaaatagataaaattattagaaaccatccatattcatggtgtggatacgatacctttgaccaaatgatagtaaggtgaacccttcaaatgttaaaaaagaaatcatattttttctcgcgtgccgttggcggactagctaattccctcttcagcatggtctttatctggtggctgcaaacttccaccaaaagttcctttgtcgtcggaattgcggaagccatcttttccaccactgccgccttatcaatattctacggccccattatcgatcattattcattcaaaaggacaagttactattcaattcttgttcaaactgttttcctatttgccacaacaattgcagtttaccaacttagcaaaagttatattttggcattaatctgcgcaggaatagtatctgtctgcgatgaattttttaatccagctgaccgggctattttaaaagaaacaacggctgatgaccaagaattaaataatctaatttctaaagttagcaacatcgaccagtttgtgaatgtagcgggaactgctctttctggatttttattaacttttttaatttcagctaatgtaatgttgatctgcagtctactgagcctaatcagttttgtttttctgttttacgccctaaaagaaattaaagatagacctaaagtcaaaaaagcagaggcaaaatacctcaatcaaattcttaatggctataagtttattaaaacaaattatttcttaagtcattacttctggtcctcaatcctgtattcttttgtgacgccagcaatggccattctgttgccaagaattgctcaacaaaatggtcaagcgggactatacagtatgttctatatcagttttatgattggctttgtaataggtgcaactattgcaggaagattatccgtacgggtaaaaacaattggttttacttggatagctagtgcagtaccattacttttgataattttcttcagtaacaattggttgatattcacaggactaattttcttatttgggctaatgacgagtattcacaatattttggcagaatcattgattcagattactgcggacgatgaaatattaggcagagtgctaactactattcgtaccagtacctctattggtggaccgattagttcaattgttgccggaattttgttagacagctctggtgaaacggttctgattttagcttgtggattcatcattctaattagcggacttaatattttcagagcagttaataaagcaaactaaaagacttgggaaaattacttctcaagtcttttttgcgtattaaattaatcaatatctaaatacttagccaaaactttcaaaacaccattttcatcattcgttggcgcttcatactttgctaccgccttagccttcgcattggcgtttttcatcgcataactatagccacatgccttaagcatatcaatatcattttcgccatcgccaaaggcaatcaaatctttttgcgcaatgccataatgcttaagcatatcgtctacgcccttggccttattaatgcctttatgcaccaagtcgattgtcatattaccactgctagtgccgcgaatacagtcaccatatttttcattaaaccgatcctgaatcacctgcgccagttcatcatcagctgtcagacaaaccttcaagatcgcatcggctggatcaatgtcagtaaactgatcgatttcctgaacatcacgataataaattctaatgtcgtctttatccgcttgatccatactcgtcaaaatatagcaatgatgctgtgcgctaaccataatgattgcttcagggtattctgtttgaataaaatgtaacaatttttgtgcagtatcatagtcaatcgcaatccgcttaaatactttgccatcggcttctagaattgccccattttcagacacataatctacttcattagtaaactcgtcaaaatattcatgcgaacgaattagttggttccctgttgcacagataaacggtatttgattagcttgcaattttcgtaaaacttttgcaaatagcgcatgatcaaaagtctttttttcggtcaaaaaagtgccatctagatcaaccgctacagctttaaaaggtatttgtgtcatgttttatcacctttctatcgtacctttatcttactatgcaagcgattttctagcagtattttgctaataaaatgaaatttctttcataactagtcaaatatttcgcttatttcaagttgcactttttaataagaaaagcactatgccgcatttttaatgtttcacatgtaacaagataaacaattcatggtatcatgctaatctaatggataagtataaggatattgtgcagtctctggcaccttatcccaagtgacggtgtgacctgcaccatgtgaacaaaagacagagttaggcgtattctccagatcagaaacgggatcataattcttttcctcaataatttctgccgcattgtgacaaggcaaataaccactgactacgcattcaagattaccttcaccatgcgtataattgcgcacttctgtcgcataatcttgcatttcagctaccggtgcagaaccggatatgactgttcgttcaccaatattttcaggcgtactaaattttccattcatgcgctgaatatcatttaaagcacgccctacctgatcttttcctatttctaagcggaaatcataccacggttcgagcaaaatagtttgttggcgtatctttttttccattaaaccttgccgcactgcacgataagttgcttcacggaaatcgccaccaaccgaatgtacaattgagcctttaccaccgatcaaggtaatcttcatatctgtaatcggcgaagctgtcaaaacaccaagatgttctttagacttcaatgccgtcatgatttgatgttgccaatttttagtcaaaacttctaaactgcatttattttcaaaaacaataccgctattacgtggcagtggctccagtaaaagatgaacttccgcgtagtgacgtagcggttcaaagtggcctactgcttcaattggtttagtgattgtttcttgataaagaatacttccctgttcaaaaacaatattcaaaccaaaacgttctttcattaactgttctaaaatttctaattgaatctttcccatcacttgcacgtggatttcttgcaaatgttcggaccaagtcacatgcagcggtggatcttcatcttccaaggtttgcagagcttttaagcaagcgtgaagatcattatcctggggattaactttataggtcaaaactggcttaagcagtgcagttggtgcatcccccacgccgaatccttgtcctggatacgtcttagtcaatcctgttgcagcaacgatctctccagcagctgcttcagtaatagttacaaatttttcaccattataactacgcagctgattaattttctcaccagctagctcagtctttgcctttaagctaccacccaaaattcgcaaccaagttaagcgttcacctttagtatcatgcgaaatcttaaagcaccgtgccgcaaacttatcagagaattccttttccttagtccatttactaaaaccagctaaaaattccgtaattcccgttaatttcaacgcagaaccaaaataaattggaaaaactttccgctgcacaattgcattctgcacgtcctgatcataaatggcaccactatccaaatacttctcaagcaaggcatcatctgtggcagccacattttcataaaattcatcatcaatcttcgaaaaatcaacgcaactctcacttaagttcttttgaatatcaaccaacgccatccctcgatcagcgcctatcgcatcaaccttattcacaaaaataaaaactggtacctgatatcgcttgagcaaatgccacaaagtgcgagtataactagttacaccatctgtaattgaaataaccaagatagcataatcaagtacactcagcgtttcttctgtttgtgcactgaaatcaacgtgtcccggtgtgtccaacaacgtaatttctaaatcatcagtcgttaatttagcttcatgagaaaaaatggtaatgccacgttttttctccaattgatctgtatctaaaaaagcatccccattgtctactcttcctagcgtccgcaaatttcctgccttgtacagcagagcctcagaaagagtcgttttgcccgcgtcaacgtgagctacaattcctgttgtaattttcttcattgtctcacctaataaaaaagtatcttacttcaaaaataagatacttcttgtgataattcaattttctttattccaaattaaattaaaagttaacctcatccggatcattagccaacttacttgcaccacgtaaaccatctaacttcttcatgtcttctggactaatctcaaagtcaaagacatcaccattagccgcaatatacttaggatgaactgacttcggcaatggcaaaaagccatgttgtaaggaccagcgaatcaagatttgagctggtgatttaccatagttttcagcaactgcattaactacctcattgcctaataaaccacctgtacccaaaggactgtaagcctcattaagcaaatcatatcccttgcttgcggccgttacttccggttgcaaatcactcggattcaagtaactttggttaactaccggcttaatttcagcagtcttcattaattcatccaggtgatgctttctaaagttggatacaccaattgcgcgaatcttgccagccttcactgcttcttccatcgcctgccaactttcagcgttaagctctgcccagttgtcacgcatagctacaggattaggccaatggattaagtaaagatcaagatagtctaaatctaatttttctagactagtatcaattgcctttttagtcttgtcataaccatgatcggaattccacaatttagtagttacaaataattcatggcggttaacgccactacgtttaattgcttcgccaacactttcttcattgccgtaagctgcagcagtatctatgtgacggtatcccgcctcaagtgcggcttcaacagattctcttgcaacttctccacttggtgtttgccaagtaccgaaaccaattacaggaatttttacgccgttgttcaaagtataagtatcagtaagtgaatgtaattccatattctcacctttctatattttttaaaaaaacatattttcaagtcaacttaattcagtctaaaaaacattacatgttaatcttaaactaaaaaagaaacagaggtgaacaaatatgcttactaatagtcagaatataattttaaaagatcaattgacgcaaaacgatatcgatcatttaatcaaaaaatgggatctagatcctacaattttcacttaccctaattcctcgattgaggttgctcgttttatccctattgattctaataaactaaaaaatggtcacttattagtgagtttcgatctattaagtaatgacttgccaattgaacaagagctaattccaatttttacaatttttgaccaaaatcatctctttattggcacaacaagaagtctttcagaattaaaaccgcaagaaaatattattgaaacaatttttcaaagcctgtgtatccaaatcaagcatcttcatgcagaattagtaacaattaaacaaaaaattgaccatttagatcaagctgcaagaagaacaactaagaccaaagaattaaaaaagtaacagatttaactcgccagctagtttacttaaagcataccttagatgatcaaacacctagtctagaagaatttggtaattatttagtagaaaacaagctagcaaatcaagcccgcgtcaaaagtatcatgaccaagcaaaaacgaattaccaaaatgattcacgtttacactgacttgctcaattccattagcggcctctttaccgccatgatggacagtcacctaaatcatttaatgaaatatctagattcagctgccctggtaattgctcttcccgctttaatcagtggcatttggggcatgaatgtcggcggcttaccaggtaaagaaaatgaaaacggcttttggattttaataatttttgtcagcttattaactattggttggggcatcttcttgaagagcaaaaagtataatgattagtacttcttctcaaaatcattctgcattaatttaaccaattctggataagtttctactacaaacttaggatgcaaatgcaaggtatttttacgatggcgatgattgtaccaaatactatcaaagccatatttttctgcacctaaaatatcagattgtaggccgtccccaaaaaagactgtctcactaggaccgatctcagttcgactgaagaaatagtcaaaggcatgaagattaggcttagaataatgggcttcctctgacgtaacaattaagtcaaaatattttttcaccccagcaagctccaaccggtgattttgcataaatttttcaccattgctcaaaacggtcagcttatagccctgctttttagcaaatttcaacgtatcttcaaccccaggcaataattggtgtgcttcaccaaagtatgaacgatattcatccattgccttcttgccatcaatctcaatgccaaaatgatccaaaataaaatcatgaaaagtcatttcacttaactcttcataagttagttcaccttgttcaagttggcgccaaagtccttgattataagaatgatactgccgctgcaattccgcagataaaggccagtgatgagcgttaaacaagctatgtaaagcaaaatcttcagttgccgcaaaatcgataattgtgtcatctacatcaaaaattatttgttgatagcgcaagagaattcctcccttctttttatgatggttgccggaataattattatagcattttaaaaattattcaaaactaaataaatctaacaaaaaatcatttgacatctttctcataattacttaaaatttagctaacaaatttgaacgaaaggaagattttatcatgattaaatttacagcaatcaatcgttggcaattccagcactagagttgtttctgttcgtgaagtacagatgcgactcattaagatcgtatctgtgctggtaaaatcttcaagaaatattgctcgcacggaaaataacgtgcgggttttgttttaggcatttcccgaaaaaaggaagtgccttttttgtttgaaggagaaaaagaatgaaaaggttaatcggaacaattattgctctttttgcttttctggcagttgcatttgtcagtgaagtaaataagaaaaatgcggaaaagaaaacgccaactgtcggtatcttgcaaacaatgagccaccccgctctagatcagattcatcgaggaattattcagggtctcaaagatgaaggctatgtcaaaggaaaaaatcttaaaattgattttcaaaatgcccaaggtgatcaaagtaatctgaaatcaatgagcgatcgttttagccaggaaaatgcgactgtaactattggaattgccactcctgctgtccaatctctagctaatacttctggcaacatccctgtagttatgggcgcggtcagcgatcctcttggggcccatttagtaaaaagcctagcgcatcccggcggtaaaattaccggtgtccaggaccgccagccaatcgccagccagctggccttaatgcaagaaattctacctaaagccaaaaacatcggtgtcatttacacctcaagtgatgattcatcagcatcagagtaccgtgaattcagacgactagctgaagcaacaggacttaaagttatcccttacactatcacttcaaccaatgatatcgaacaagttgcccaaaccatggtaggcaaggttcaagcagtttatgtcccaaccgacaatactgtagctagtggaattgccaccttattaaaggctactaacagtgccaagatcccagtttttcctgctgccgatactatggttaaaagtggtggtctcgctaccaggtgtgtcagtcaattcgacatgggaatcttaactggacaaatggcaggacaaattttacatggtaaaaaccctgctgctcttccagtcagacgcgtaacccattatgaaacagtaatcaatgaaaaagcagcacatgaattaaacatcactattcctaacagtgtaattcaagctgcccaaaagaaaggacgaattatcaaatgagcttaattacttcttctattggccaaggcttactctggggtattttagccttaggcctctacctaacttttagaattttaaatttcccagacatgactgttgaaggaaccttccccttcggtgccgcaatttgtgttagtgctttagttcatggcgtcaatcctttagcagctaccattctttccttcttcgctggcatggtcactggcttagtaaccggcttactatatactaaaggaaaaattcctgttcttttagctggtattttaacgatgactggcgtctactcagttaatcttagaattctaggcaaggctaatgttggtttacttaacaaaaatactttactaaacggtcagcttttacaaaaattaccgatcaattttcctactattgttgttggtttgatcattgccattatcgtcatcgttttgctagcagttttccttgatactgatcttggtcaagcctttattgccactggtgacaacgaaaaaatggctcaatcacttggcattaataccgataatatgaaaatcttaggtctaatgctctctaatggcttgattggcttagctggcggccttttagcccaaaatggtggctacgccgacgtcaatatgggtatcggtactatggttatcggactagctgccatcattattggtgaagtcgtttatggcaatttaagtttaaccgcccgcttggtagcagttgttatcggcagtattatttatcgccttatcttactcctagtcctccaacttggctttagtaccaacgactttaagttgatttccgctattattcttgctatttgtatgatgctacctttatttgaacaaaaatttcgcactcgtaaattattaaagaaaggcgttgaaaaaccatgagtactattcttgatttacaaaatattaccactaccgttaatgctggtaccaatgaagaaaagcaaatcctcaaaaatattaatctaaaacttgaagatggagattttgttactcttttaggaaccaacggtgctggtaaatcaacgctactaaatattatcaatggctctatttttcctactagcggaaaaattctgctcaaagaccaagatttaaccaatctttctgaagtaaaacgcgctaaatatattgcccaagtattccaagatcctaaaatgggtacagctccgcgaatgactgttgcagaaaacctattacttgcaaccaaacgaggtgaacaccgcggtctgcgtttaagaggcctagataaacatatgcaagaatttaaacgccaggcggcccaactccctaatgggttaaatgaacgcttaaatacttttgtgggtaatctttctggtggtcagcgacaaacattaagttttttaatggcgacaattaagcgccctgatttactcttactagatgagcatactgcggcgttagatccaaatactagccgcgaattgcttgaactaactgataaagttgtgcaagaagagcatttaacctgtgtcatgatcactcaccaattaaaagacgcaatcaaatacggaaaccgcactatcattttaaacaatggtagaatcgtttttgatgtcaaaggcgacgacaaaaaacgcctaactgaggaggatattctgcaatacttcacagattagaacgttattttaggattataagttaagagtgaacgacagctataatatgaacactgtgaatttgcggattttcttattataataagagccgaggtcatcgttaagggacttataccaaaaatctccgcagttattcaaaatgaatagctgtttttttctgccctttttacgaaattccgtaaaacgttattctagtaacatttacccagtaaaaatattttcctaaaaaatgtacttttccccttgcgttatataataagaattgtacggaatgaggaacgaaaagttccagtagataagtgataagaggtattcattatgttatcaaagaaaatgattaaggttgtttcagttgtcgttgcttcaatgggtttaatgagcgttggtgcttcagttagtcaagctgctagttttgaagctcctaagcttggaactgcacaagttatgccaaccgatccttcaatcaagaagggtgacaagatttttgttactgttaaagacaccaaaaatcaaaaagttaacgttttgaatgctcaaggtcacaaaactactcaaaaagtttctatgggttcaacctacactgccaaagatgtcaaaaaggctgatggcaagaagatcgttaagatcaacaagagccaatggttgaacattaaggatgttgtaaaagactaattcttctagatcaaaaaataaacaatttactaatgaatatccaaaaagagaaccctgctcaacggaacaggattctctttttgcttaatttgacattttaactgaaattaaaatttatttgttgtaatattgctctaacaactgtttctcaggatcaacatcaattgaataaatccaattattagtacctttaatatgataaatagcctgatttccattgaatgatgctattttggctgctaccatgtcagctcttttgccatattctagccgatcaactgtaaacttagtaccatttggaactctttttacaatcacagccttattctcagcagtagtattttcatcaaaagtaaatattggtgctgtcttcttatatgtgcttctaacatgaactgttactatagtttctttggcatagtgcctatttacatcagttgatcctgaagcagtattgcttttaattactgaacttaagttagctgctttaacatattgcttgcttgggccgcctattctaaagtaactttttccatctttaaatttgtaagaactaccatatgtagtaatagtttcacctttatttaattttcgtcttccgttaaaaaaagtgcgtttagtagagctactataaatataagtgttatgagtaatttttcgtgttacgccatcgatatttgtaggctttatatataagtatttaccagttactttgtaatattgttggtcattaatacggacaggaatctggtcaacgttaataactttatatggataaagttttatgcccgagttcctaccatttgtatcataaccaattgcagtatgcataatagtctttctaattgaagtgcctgcggcctgtacttcattaggttgagtagtccaaaccgttaaaggtgtaacggctatcaatgcagctgcagaaattaatgcaattttatttttcttcatcataatcatcctttttaattctcacactgcaattatacccccttacgttaattagagttttataagtttacataaattaatttgaaaacacaaaaaatcgaatattacatcttgcagtaacattcgatcttctttttaggattttttatccaactttatgcgcttaattaataccatgacaatttataaattgtactgtaatcagtgtatgacttatattcaccagctaaagaatcatattttttaatatgatatgcaacagttaaatatgcattattagcatcgattgcttgaataccttcaacttcagtgtgtcgaccagttcctggtttatcaattaccccagaagcgcttagatttacattagtccattgattttgatcatctctagcattagcgggaataaccaaaatttctttatgaaatgtatttcctgctgggaatctacctgttgctgaatcaataattggagctttttgacttgaaataaatacatttaaattgttatctacatcaaagccttgaagcgaatgtaaaatatagctcttatcattaacgtcacctgaatacaatctatcaatagtaaacttatttacaacatcagattctgaaattttaccaatatcataataacgctgtgcaccactattatattgcacgctatcaagtgcatcattaatagcagccagattataaatagtaaaatatcccttaccattgttatcaactgtaaccaataagaacttagtgtgatctggagaaaccgctgcctctgctcgtactaaactaccagtatatggtacattaccggcacgatctaagtgagctaaacgtggaaaatcatagtgtgtagtatgacgaccaccattagtcttaatatttacacgagcaatttgaatagcccagcttccactcggcttagttccaataaaccaattattaggacctgcataggaccaagtctgcgtatgaccagctgctgaaccgtgtaaatctaaaatagtgttaaaattaccaccatttttacttctacgtaagacgtaagtactcttttgattatcacgtaactgcaaagcgtaaatatagttttgacctacatctcctttttggacaactgaatgatgaccaatacttaatgaaaactcaccattatttgaaatatttgatgtttcgtacataacaaaacctccgaaaaattaaaaattattactacttatcctgagtctgctcatccatttgcttagctacttccgcaaagatatcctgcacttcttgcttgttcagcttgaagccttttgcctcaagactgttcactactgcattgccaacgcgattaatcttctgttcgtcagaaagattttccttgtcgtataagcgtacatagcttttcatcaagttgtctgcagtattgcggaattgctctaagcgcttgttcttaaaatgaaccctgctcaagatgccaatacctactacgctaattacccataaagccaaagtaatcagctcgacgtaatcatgaatatccatgattaaataaatcacctctcttttgatcaaatgatcagagggggttaacgaatgtccattggacttcacctctgtttgataatgttcaacaagcaggcctaatttaagtattgacatattagtcattgaccaaaatacgtcaatatactacaataagggtataaaaaacagactagtgccgttgattccactaccacatagaatttttctggtcattagattgtttttaacttgttgacagttcatacaatatgcttatacgaatactatgtcaagttaaaatatgctttttagcatacttttttatttagaaagtgaagaaaacctcgtcatgattgagtttgagcgtacaaaagaattagcgaaaaaaagaaaaatgtctttactagaagtaaatgacaaagctggactaggcaaaagaagtatctacaattggaaaaccagaaaacctggtattatggccttaggtgcagttgctaaggttttgcatacatcaatagactatttaagtggcattaccgatgaccctgctccacgtttgcaggacactgtgaatttggaagacgaggtgccctattcatactatggtcatcctgttcctaaagaatatcttgacatggtccgagaactcatgaagagagacatcaaagagagagaagctagaaaacatggcagtggacaataactatagaaaaaatcaactaatcacgtatttatttaattatgcttatgagcatgatattggttacgtcttttttgaatcagatcccaataatccctctctttcatttaaaaatgagcgagaaatctgtatcaacatgaattggcaccaccattcaccggaagtaccatttacagttgctcatgaaattgggcatatcatggattgcaggcccaacttaaaacaatataattgttgtcttgattatggcggccttgatgacgaagaaagagatgccgatatttatggattgcatctgatctatcaatactcttgcggacaagaagataatttctatgacccaattgcattcgtccaatcttatgcaatccctgaaagaatgatcaaagaaacctacaaaatgttcaaagacgaaggcgaatttttctacatagataaatcacaaaacacactacatgcataattgcacattgtagtgtgttttttaatgagaagatattctattttacgtaggtttccttaattgctaagactgataaagctcccaagaagcctgaaataccagtgattaacatcatggctggcatggaattgccgaccattgggaaaattaagaaactgagcagtgatgccacaatttgaggtaaacaaattgaacaattgaataaacctaagtaagttcccatgtgcttacctgataaggcgttagataccatggttaatgggtaggtattcattccggcccagctgataccaatcaagataaatgctaaaatcaaaagactttgtgaatgaatcaagaagattgaagtataacctaccccgcctaagaataaactaaggccataacccaatttatggtgattgtttggcaccttagccaaaacataggaccaaattaccgccgcaattgattgcactgcagtcaaaacaccaaaccagttaccggcaatctggtagccagcagaagaagcgttggtggtgtgccaaacattttgcgcaatcgcaccagtggcgtaagttgataaatactggaatgaaatccagcagaagaactgcactaaggatacttgccagaagacctttggcgccttctttaacaattcaatccagccgccaccttctttgttatcagattctttaatcccgtggtagcgcgcatatgtttctggatcatattcatgtactctaaaaatagtaaagagtgaagtaattactaaaacagcagcaccaacgtagaatgaaataactactgattgtggtaccacaccttttttagcagtattggctacacccaaactagttaataagaatgggaaaaaggccgcaattaccgcaccaaagttggacaacatgctttgaatcccgtaagcgtatgacttttgttcatcattaaccatatcaccgatcatcatcttaaatggctgcatcgccatgttcgatgccacgtctaatatcgcgattgcaacagcaccaaatattagagcctcaattgaaccatagcctagaccaaaactaccaacatttggtaacaaaatcatagtaattacggcaaagatcataccgactaataaatatggcaaacgccgtccaatcttaggaatccaagttcgatcggataatgatccaattccaggttgcactaccaatccagctaacggcggtaaaataaagaaccagcctaattttgtcggatcagcacccaatgtttggaagattcgactcatctgtgatgtttccaaagtaaaggcgatttgcacacccaaataccccaaactaatcatccaaattgtcgtactagctagcgtaggtaacccagtttttttctcctccatttatttttcctctcgtttcttaaatcgctttcaatagttaaaatatagcggttacagaaagagctttcaatatgatttatcttgttaccggtaactaaatttttctaaagcattaatcttcctactattctattcgtccaatttggtagtaaaatactctcatagatttatggaggtattaatatgctttctttattattaacattactcttactctggctattttttaaattaggaattggcctcattaaaattatcggctttttactagtcgtaggaattatgtttttcttttttgcctatttgctcattccgttcttggccattgcgctagctggaagcttgctttgggcaacattaaaatagcgaaaaataaaggaccgcaatttgcggtcctttttacatttgtttcaaattttcagcgattagttttcctaaaatctcatagccacgatcaccaaaatgaagtccatcgttttttactccttgacaaatctcgcttaaatcgccaatatcccgcatagcttgtgccagatctgcataacgaaaatgatactcatgtgctacttctttcacgatctgagcatattccgctactaacgtattattccgtacacgttgcttagcttcatcaacagctggcggcgaaacaagcagaacatgtggtgggtaatattgacaaattattgccgaggaaataatttccatattttgcttaaattgcctcgctggcacttgtttgtgcatagccaaatcattggttcccagcaagatcaccaaattatcgcactgctttacgcttagtactaattcatttaatttggcaaaaaatgccccagaattaattcccgaaacagccgtattttctagttcaatctcaggcaaaagctgttgtaaattccaattaaggtgcggttcattttttccttcctggcgtgcaataatgctatcacctgtcaaaagtactctcaattatttactcgctttctttttacttttcttcgccgatttaatccctaagacatcaagcaagaaagtgaagatcggcacaccgacaatcaggccccaagtaccccagaagtgttcagctactaacaaaactaaaaaagtataaaagatcggtaattcggtcttgctagccataaatttgggattcaacacataggcctcaattgcatgaataatcatgatcataatgaagatataaatcacataacgaatgccaccaacagaatagccgataatacttaatggaatcaaagaaatgatcacaccagctaccggcactaaacttaaaataaagaccattaagcctaaggcaataatttgcggcatatgcataaatgccagaccaatcatcgtcaaggccgtattacaaatggcaataaagaattgcgcctctaaaacgacaccaaaagtattggtaaactttttaccaaaatagcgaatatcctcaaaaagccatttaaagtaaccacttttaacaaataactttgaaaattcaatcattctatctaattcaatcgtatagaagaaacttaaaatcaaggacataaaggtagcaattgttaaactaccaaaattggtcaccgtatgcagagcaaaagtcccaactcgttttgcctgcgtaacaatctcacctttactgatataacgcgttacatggctggctaagcgcgatgattcatttgattcataaaacgccatcactgactttaccattttagatatttggccaactaacatgggcaaataaatggtaaccacgaaataaagcagcgccaagataattagatatgttaccgcaacaattagacctgttggtattttaggaaaataccgctgcactagatgaattaaatgcacaatcacataagtaaaaataaaagttaataatactgtgttcatcattgctcgtatttcataaaggcaggcaataattaatagcagtaccacaaatcgacgtaatggaatattatttttaaatttttgccaggctgtatccatattttcctccaacataaaaagctgttatttccttattctatgcctaattagccaagaaagaaaactaatcttagcttcaaaaataatttaaaaataatatttttcacatttttattcatttttctattttttttcattttaatatcatagaataaaactcaaatatttttaatttatttggaggtgctttttgaatgagtaaagcaaaacgatattttggtgcattagcacttgtttctggggcagctttaagtttggttgcctgtggtaataataaaaattcaaaaaataataatgcagatgaaacacatcacaaattcagtcaaactgttcctgtgaaaagtgttaaaaaaggtggcactttaaattatgctatcgaatctgatagtcccttcactggtattttcttgccagaattatctgatactgccactgacactgaagttgcagagccaggacaagaagagttattctcagtcaacgatcaatacaagattaacaataaaggtgctgctacctttaagcttgaccgtaaagccaagaccgtaactatcgaggttaagaagggtgttaagtggtcagacggcaagcaagttaatgctaaagacgtggaatacgcttatgaaattatcgctaataaagactccaagtcacaacgttataccgattctcttgccgacattgttggtttagcagaatatcacgaaggcaagagcaagaagatttctggtattgagatgcctgatggcgaagatggccgcaaggtcgaaacaaatgaagcctggtatgcttcaatcaggtaacggttacttctgggaatacgctgaaccttaccattacttaaaggacgtaccattctccaagttgatgtctagtgacaaggttagaaaacaaccactcttctacggcccattccgcgtaagcaagcttgttcgtggtcaatctgtcacttgggaacgtaacccgcattactggcgtggtacaccaaacttggaaaaggtatccatgacagtcatcggtaccaactcagttactcaagccatcaagagtcacaagttcgacatagctggcgtagttaacacccaatgggatgatgttaagaacgctactgataccaacttcattggtaaggttcccctatcctacaactacttaggctttaaggtaggtaaatgggataagaagtctggcaagaacgttgaaaacaagaactccaagatggacaatccatcattgcgtaaggcaatggcttatgcaatgaacgttgatgcagtcgctaaacgttactaccacggcttggccttccgcgttaacactttgatccctgaacaatttggtgattatactgacaagtcaatcaagggttacccatacaacttgaagaaggctaacgaattattggataaagccggctacaagaagaagggtgaatacagagttcaacctaacggcaagaagttagtaattaacttggctgttagaaacaactcaactaccgctgaacctgtttggagaaactacatccaacaatggaagaaagttggtttggatgttaaatttgtcggcggccgtccaatggaattcaacaactgggtacaagctgttcaatctgacgatccaagaatcgacgtcttcgaaggtggttggtcactttcaagtgaaccatcccctaacgacctttacaatgaagctgcaccatacaactttgctcgtttcgtttcacctaagcaaactaagcttttggctgatatcgactcagagaaggccttcaatcctacttaccgtgctaatgccttcaagaagtggcaaaagtggatgtatgatgaagcatacgttgtgccaactaccaaccaatactcaatcactgctgttaacaagaaggtcactggctggtcacttaagcctagtgccaacacttggttcactgcaggtttcgtaaaataatttcttgaacaatcctttttctatattttctataacaaataaaatttacttttcaacccctatcaattaatctcaaaatattggctctataatttttcctgttgatgacttatctatatgataagctgttaacaggattttttattgcaaaaaagaggacatagtcctcttcaataaaaatcgtttccacacaaattcttataaataaaggtgatttctataaatcgatcaaactgcaaaagcataaaatctatgaagctgaattgcttcaacctgcttgtcctttctgcggctccctagatctcttacataatggccatttgattaccaacattcactatccgacagctaatgcaagcttaccggtcattataagattagctaagcaacgagttaaatgtcgcacttgtgagcgctgatctatggctcagtctgaattggtaaatactgttctatttctaatgcctctaagcttaaagtgttgtcagctttaactgaagatcgatctatgaccagcattgccagagaaaacaatatttcaattaatactgttcaaagagtactgggcaactgttcacaccggtttattgacagctacgaatatttgccagctcatttagcttttgatgagttaccgccagctgcactttatctgcctggatggtgataatcatcaagtcgttcagattcttagaactcgctacaagaagacgctgcttaagtattttggtcgtttctcgctccaagctagagctaacgttaaaacggtcacgatggatcttaatttttactatcaagatatcgttagagcttgttttcctaatgcacagattgtcattgatcgttttcacatgattcaaatgcttacgcgctcattcaactcgctgaggttccaagtcatgaagacctttgataaaagatcgcggcaatatcagctgcttaagtctccttggaaattatacttgaagaagtttgatgaacttgaaaaagttcatcctcactataactggcactacaaagactgcttaactcaagcacaagtagttacagaaggcatcaataccagcactaccttagagaattcatataacctgatgcaaagctttattcaagccgttgaaacgggcaatactcatgagctcaacttattaatcaactgccaagatcaaattgggactttaatgcacaaaacactattgacctttaaacataacctaaaagctgtgcttaatggagcaaaactgccttattctaacggctgccttgaagggttcaaccgcaagctcaatctaagtataagaaaaaaggtagataaaaacatcgtcatgtttctatctacctttatactttagggtgtttgacaaagagccaaaataattcggttcataaagtctgattttcgtcaatgtcttaacttaatgacattgctattctatgcgtctttttgtatgatttattcaacttagctaattaattttcttttttatgattaatagctataccaaaaatgcccaaagcagctgctaacaacccggcaacggcaaatgctaccttactttcattttcaccagtctgtggcaaagtttgagaattttggctgttgttcttggcaataccgttttccatatttgccttagctgaagtagctagaccagcagtagtattagctaaagcgactgccttaggactaatcgtaccagatttagtggttcgcttagcctttgaagactggttagatttagaagtagtcgttgatttggtcttgttagacttattattctttaccttcttaggagtctcctttgtaatcttcttgccagtattatctttcttggtgtcatcagtcttcttattgtcagttggtgcattatttgaattatttgagttattgtcactaggatttattggcacaatcgcatctgaattgttaccaccattgttgtcattattacctttgtccttgctgttatctggttgctctggggtctcattagctgtatagctaatctcaacagttgtatcctgagtgttctcgttcacagtagtttcatcaatttgagctggggctggagtgtaacctttaaattctggagctgagtatctttcccacttagcagtagaccattcacccacagatttgattttcccagtaggtgcataaagaatcacttcccgtgtcaatgttgctttttggataactttttggtcagttccgcttggcgtgtggacaataattgttcgagtaatgtccttggtttctggctttgtgatctcattagctgtatagctaatctcaacagttgtatcctgagtgtccttgttcacagcagtttcatcaatttgagctggggctggagtgtaatcttcaaattctggagctgagtatctttcccacttagcagtagaccattcacccacagatttgattttcccagtaggtgcataaagaatcacttcccgtgtcaatgttgctttttggataactttttggtcagttccgtttggctcgtggacaataattgttcgagtaatgtccttggtttctggctttgtgatctcattagctgtatagctaatctcaacagttgtatcctgagtgtccttgttcacagcagtttcatcaatttgagccggggctggagtgtaacctttaaattctggagctgagtatctttcccacttagcagtagaccatccacccacagatttgatttccccagtagttgcatcaagaattactttccgtgtcaatgttgctttttggataactgtttggtcagttccgtttggctcgtggacaataattgttcgagtaatgtccttggtttcttgcttaacatcatcaacataaaccttgcgactatccttaactactcgcccatcagcataagtatgactgtaagtgacagtgtatacccccgccttagtcaagtcgaccttatcaaccggagcagctgtagcagcccctggagcttggtattcataactaatatccacgtccgtctttggcaacttttctagttgatcgcgcgtcttccgctgtcctgcgtcatcagcagcataaatctcatcaatcattgaagtggtgtcccatggcttagcattcggatctgccacatagtgttgatctttatttaaaataatagcaggcacagcttgaacttggattgtccagatagatggggcaacaggtttaccaccaccatcaataagggccagtggcagggtaacgtatccatagaatggcatttcctgagctttaccgttgttgttagcatacttgaccgtgtaaccatggttagcaaaaattttctgaatttcttggaggtcaacaaagtattgcgcagagccataaacaaccgatggtaagtccccttttggtagtgaatccatattgaatgatcccttataggttgggaagttactaattttaatggcctcccacccatttggcatatctttttcaatttccttaaccagcttccagtttgattgaccaggttgttctcccatgaactcagtcggaagcaagactacctgcttaacctggcttaagtccttgcgcacagttgtgaagtagagtttaaccgaaacatcttttctagcttcagatttaaattctaaggattgaacttgatcagaaagtttcccaatatacctaacaggaacaactacttcaattgtatcgcccggcttgaaagcggatgcattcatattgatgccaacgaggttatctaccgatccgttatggttcttaagaaaatcttcccaactataatagagtctcccactagtattctctctataacccccgttgttataagaccaaccctgttgactcttcaaacggataccatcagcacctatacgactagcatcaaccactagagtcttaccatcagcaaagcttgctgaaataccggccgctacttcttcgtcaccattacggtaaatcatatggtattccaaggtatttagatcaatctgatcaacattgataatcgactcagacttaccattggcagccacatatccagttacataggtcttaccatctttccctttagctgtatagtatgcaacatattcaccatgctccgttttataccagtctgtagcagtagctaacggattgttatagataccggtagtaactgactctttatcagtagttggagcttctggagtatcgatttgctctggatgtaattcaataaaatcgaacaccatattagcatttggctgcccgtaatctacaacttgaacattgttaaattgctttgtgccatcagttctaccaatatattttaggggaacggttaatacgaagttagtcccggcctttaaattgttgccaattttaagagcatttatcttactcatatcttggccttcactaagccattcatcataggttttgtacttcccccccatcctggtgttaacgtataggctactttttcacctgtatctgtagtgaaagttagaccatctttaccaattctactggtatctagtcggagccagtctccccaatttacaatgaaattttgaaccctatcctttaacacctgatattcaatgtgtaattctagactatttggatcaaagcgattagtaaaaattaatgaattaagtcgcttaccgaattctgcataggaactgacatagattttttgatcagttcccttaacggtagtgtagacctgggcccgcgcagtagatgtttcaagccaaattttttccaaactattcttgtcattgataatagcagtattagctgagttatctggaaccgttggatctggtgtttcagcagtagctgctgccttcattgctgttggtgcagccggtgcgttaaccttggcggttgtcttcggtgtagctgttgttgcgtcgttagtcggcgttacttcagtatcttttttgtcgacattggtagtattttgcgtagtttcattcgcatttgtctgcttgtctttatcttgcgtagtatcttgggtatttgttgccactactttttcttcagcattagttgtggttgctggttcagtaactgagttgtcgcttctctcttgaacagctgcgttagaatcaatgttttcatcttgagtagcaccagattgagtacttggctcactattatctttatcttgactagaaggttgaacagcagtactagtaccttcatttgggttaatagtatcagcaagtacctttggagagttcatcagtattcctgatccaatcatcactgaggccaagccaactgacagttttcttagtgtatattttgggactctttctaacatgatctttctcctcgtatcataatgcactatatttcaatgcttaataatttttacattattataacacttataatataacatagaactattaactttgataaataaaatcgcttagaaccaagcaaaaaataatatccatcaaaaataaaaatttctggaacaattttgtttaagaattttccagtgtaataagctacgactgctgcgtcgggtaatgtcatgattaatggtttgaagcatctgaccaatgatggcatcatcagtacaataaattttttgatcatagtctaagaaccatactggtgacgtgctgatattctttttctcttcaagagaactgtacaggtgatagatgttctagtaggtctaacgtagtacgagcatccattttagttctcttaatgactctatctgtatcggaatcaatggtatcataggctttatgccaagccttgcctatagtttctaggcgactaaaaaactcttccatggacttggtctgcccttcaaaaacaggaaattcaaaaagatcatcctgaattaatacaatcccactaaagtggacgattgaaatatataaagtattacgcgtggtgctagttaaatcgttttagttaataaaaaagtccaatcttgttagactcaacttgtataataatagaaaagagcctgatctgattgaactgccttaagcttaagcgttttagccaccatttacaagttagttttaaagatttagtgataatttgtcggcactggtatcgtttgtatgcaccggctgagtttactcatcggcgaaatattgatcaaattaaaactacggacagtctgattttggctttacttatctggcaagctaagacaggaattgaatcacaaagaagattctgtgaatgtttcaattgtttatcacactcacgttttaatcgacgttcacgtcagctattgcaattgatttatcagatacggcaagaaatgaataaaaaggttgacctgaatggacatttcttgatcattgacagctttccggtacctgtttgccaaccaattcgcaactatcgtgctaaaatttttcgcggttatgccaacattggttataaggccaccaagaaaatttacttctatggtttcaaagttcatgccattgttagcgatgacggttacattcttgattatgtcgtaacaaaagcatcagttcatgatgccaaggagacagttgaactgctggaaaatgcccatccatctaattactatcttcttggcgacgaaggctatttaggcaaagaactgcatcaacagctaaaacaaatgggttatgaactttggacaccatatcgtaaaaatatgacaggagctaaaaagcacaatgatcatcaattgatggctattcgcagaacaattgaaagcgacttttcgcttctgacctattacaatgccgagaacaatcgagcacgtagtctgataggctttcaaagccggttggaaattgcaattttagcttataatttggcttattgtctagaaagatttaactagcaccacgcgtaaagtattcaattattcacgaaggtgggattttttaaattttgttactaaaaaagatcgaacccaaaatgattcgatctttaacgaacttaattcttattcagtattagtgcttctttttaggatcaaacaacatccctgcaagcaaagccaagcctatgccagcaagggcaaagcctgcattcaaagtagatttcttttcaccagtttgtggtaatcctcttcttaaagttgatgaacccacatgatcttttactgtcagatgttcttcttcagtagtttcaggagttgatggtgttgctattatattggtcaaattaagtttaaatgaacaggaattatcagatgacgtattaaaatacctcaatcgattatctgattaccttttcacccttggacgctatgccaacgttttagataactacaccgaaataaaaagtaaaaaacgtgaaccaaatagaattaatggataagaaaaagtgtctgggaaaaaactaagtctcagatcatgaaaaaagaacgttgaatttttgtttcaacgctctttttgtatacttttagctccagccttgatattattaaatcatcacaaaataaaaaaggtggaaactaacatgtacaagaattatatcacaggtcaaactgctttaacacttaatctagattttgccattccggccaatcatttggctaatgtcatcagctggtttgtagattcaattccagaagatgttttagtaggcaagactgctaaaacgggccgcccagcctatcatccagccatgatgctcaaaatactgctttttgcttactccagaagagttttttctggcagaaagattgagttgatgctggaagaaaatctgccaatgatgatcttggctgaccagcaaaagatttcatatcatactatcaataattttagatcaagcagccatgccaatgaactgattaaaaagagctttatctacttcactaacctgttagaagatgaaggcttaatcaatgaaggtgctgcttttatcgatggtactaagattgaagctgatgctaaccgctatacatttgtctggcgcaaagcggttgaaaagtatcatgaaaagctgaaaggccaggcagttgaactttatgatgaattgattactaaagaagtagtcaaagaaatggaaaaagaaaaagttcaaactagtcaggggctaaaggaattagctcaagaaactgaagcagaaattaacaagctgactaaagagattgagcaggaaaacaaagccattcctggcggttcacctcgaaaagccaagcgacgtggactaaaaaagattctgcaccggctaagaaaagattatgtgccaagaatgcaaaaatatgaagaagccgaagagatctttgccggacgcaacagttattccaaaacagatcatgacgccacctttatgcatatgaaggaagaccacatgaaaaatggtcaattaaagcctggctacaatattcaagcagtcacgaccgatcaatatgtagttgattatgccatctttcctaatccgacagatttcaaaactttggagccggttttggatcaaatgaccgtgttggacaagtttgacaaaatcgtcgccgatgctggctatggcagtgaatacaattattcgatgctggaggaaaaatatccagacaagaagtactttattccctacactatgtatgaaaaagaacagaccaaaaagtataagaatgatccaactaagctaatcaactggtactacaatgaaaaagatgattattacattgatcatcatggcgtcagattcaatttcaaatattacagccagcgcaaggatcgttctactggtcaggtccgtgattttaaggtttatgaggcagacgagttccagctaacgccagaattggaacaattggctaaaacagctagcggccgccagcgccaagttcgctataatcctaactggcaatatttaaaagaaaaagcaaaagaagttctccaaagcgaagaaggcagacacatctatggcatgagaaaatatgatgtagagccagttttcggacatttgaagaacgtatttggcatgcgcagaacgcacctgcgaggtaaagagaaggtcgaaaccgatatcggaattgcctttatgatgatgaatttgaacaaatattgtcaaagaaggtggctgaagggccgatttttattgttaaaaattttaaagagaacaaaaaaacgatcaagattcttaaaaaaggaaatcttgatcgtttttattcatctggaagctatttttttcccagacacttttttcaatcccacaaaataagattatgttagttagctttctttcttcaagacttctttcttaatttccatgaacttaggagcatcagtaacttttaattttggaaagctcttcaagtagcgcttatgattccagcttaatcgttgcggttgtaattcatcatagtgctgcatcactgagtggtgccaatcaccaacccgcaattttcctttctcaggcatatgactttctactttagttctaactcgctcaataaagtggttaacatgcacatcccacatcttagttgtagtatggaatctctcgacactgattactgttaatactaagtcaatacccataacaatggtaatacccacagctagccagccatgagttatcttttcttcattattaatgagcttctgaatgattggctgaataaattttactaataaaactacaccaacgccccaaaataatgaaatcattggggccactcgaccttgaatgttaccccataattttgaataattccaaagcttcatgtgaaagattgtctctaatagccaactagccacaaattcgaaaatagtggcaacgatagtccctactataaataaaaggagcaggttatctcgcacgtctttggtacaaattaaaattgtagtaacggcgaacccatatacggggcagtaaggaccaaacagaaatccccgataatcataatggtggtctttgatcgaacaataaaaggtttcccaaagccagccgataactgaataagtaaaaaataaaacaataatttctgaaatagtgtacggcatgtttgtttctctttcatgatacaagtttatctatctaaataatacgtgaaagagtctattttggctattgaaaatccgtattttagtacaaatatagattattttaagaattttgttcgaactgtccaccctgcaattattaaaattatgccaaatacgctgagcataacaccggcagtttcaccagctttaggtaattttgccttagtttctgatgtgtcacttttagggagtgtgacatgagtatcgtgtttttgcgacttaggcgagatagtacttgcattgtccttaatctcgtctttatctagagtagtttttactgaatcagaatctattttagctgtggattttacctcgttagccttagtatcaaaaccagtcaagcctttgacagttggagtgcgtgaaaggtttgtattttctggggaagcttgctgcttttgatctttgacctgtccttgaactttttcacctcctttatctgaagtagtttcttttttattaataatcagctctgctagacgtttaagccaatcttcagagcgttcttcattacttttagattttttaattaacgaaatttgattatcatctctaaacgtagatttatgtggcgcttcaatgttaaaattcttattacttcgatcgtatttaatttcttgctcgtattcttgaactcgatcatcgcccaaagtaaaggactgactcacccgaagataattaggctcattaggctctgcttccaccttggttcgatacttaatcaaaattgtgctctctgaatacttcttagcaggaaattcagctgttaatttgtttttcttcaatttaactaaactagaattttgaataaaattatcattcttaattacttcaatcgtatctggatctagaactaagccttctggaattaaattttccaacttcaaatcaccagtatatttttctttcttgggattcagccttatttcccaggtaataaaatttgtctcttggtcataatgacctgcaaaactattatcagactggtcttttggcttctcttttttgtcagtaactgcaatcttaggcgttgtttcgttttgctctattgccgcatttactgcgatattttctttaattaataaggcagctaagactgcgcttccgatcaataactttttcattcattttccctcacttcaaacttgatcaaagagagtatatctgaattaaaatattaaagatattgttttgacaacgaaaaaaacaaaaagccgacttttgtacccaataagtggaacaaaagtcgactttttgtatcataaattactatttttttcctaatcaatgcaggttgcgtttattcttttttcgccaagcaagttcaactaaaaaactaataattaacaaagcaattactgaaatccaagttaaagtttcgtggttgagaattgtctgaataaacaacaaagcaaacaaagctagattcaatacaacagagcaaatcaaaatccagcgcttggccccagtttgtcctgcaatgcgcaagtggcctaagttaaccatggcatacaccaataaaaaggctaggctggccatctcaccaacagctgataatgggaaaatcacaacgaagatgcagacaatcagtgaagtgatgaacagaccccagttgcctaatactagcttaccagccgttgccaaaacgtggccttgattagctactgcgccttgaacgcctaaggtcatcaccacgactacactagctacaatgtaaatcaccatgacgatccctaatgaaaagaacagcgcttgtggcaactgctttttaggatttaccatactccctgcagcgttagtaactacgccaaaaccttcataagttacgtaaagtaaacccgcagcagataggatacctacaatattgccgctatttgaactagtaattgtcggcacatgcagcttagttaaacctaccgctacaaaagacagtaagattaacaattcaaacgcaataattgccgtttgcgcacgtgccacttgctttgaacccataatattaattgccacaaccacgatgacaattccgatactgattgccttacctagccagcctgagcttgattttcccaatagttggcaggcatattccgcaaatccggtcgcatataacgccatggcgataatccagccgatatactggaagacgttcatcccaccagctagcaggccatctccgaattcttttagcaaaaacttagcggcaccgcctcgatctggatacttcattcctaactttgaatacgaataaactgaaaatgcggccacaatgcctccaattagaaatgatactggcagccaaacaccagcagagttggcggccaagccgagcaatgtatataggcctgctcccatcatgccaccaacaccgatggccgtggcacccactacgccaattgagccagtcttattttgttttttcatcctttttgccttgctgtaaattttattgttactttaattatatagtttttcagcaaaaaaagcggatcgactactttcgattcgcttattcgtcttctttaattactttcaatcgttgcactcttccaatcgcactaccagcaccgcaacatacgcctagccataaaccttgtggccaaaaatcaagcacatttactagattattttgcacagaagaagctcctagcgcgctacctaatgtaccaaaaactgcaccaattattcccgctattatagcctttatccatattctacgaattgctttggggcgttcatctgctgtaatttcgacagagaatattttaaattttcgcattgtcaaataagtataagcactcatcatcagcatcataattgcaatcgccaaaggtaaaaaccacaaagccagctcacttttaatagtcaatgccataattagcgtgataaccagtaagatcagttccactataccagagattacataggcattattaccgattcgttcaacctctgctaattgccgctcgtctaatttactatcaatgccataccaatatctgacaaacttaagccataaactttctcgtctcattttgcttcatccccatcccaaaacaaagtattcaaatccgttcctaatgcatgcgccaagtttaggcataattctaacgatggattatacttatcattctcaatcaaattaatggtttgccttgccacccctattcgtctagcaagctccatttgtgatatttgcttttgcttacgatattcccttactcgattcattgaattcttctttattcatctagttagatgtcatttatatgtgacgtttttaaaataatagcaacttttatagtaggtgtcaattatatatgacactttattgcataaaaaagatgatctttcgaccatcttaaatgcatcatgcattaattaatctagcagcattttcttgcataattttcctttgtttacctaaaaacataatcaatgtcataactaaagcaaaaaccatgctcaaaccattactcaagagatcattattgccataccatgatagtattccgccaccacctgcagaaagcgagaatgcaataagatctaatgaaaaatgtgaaagcaatactaaccagaattttccagaatataagtacagtgtcgccaaaaagcagccataaccaaaagcaaaaattgcttgcgttgaaattataaatattgggccttggtcaagtagtccggcataatgtatcaatccaaaaaatagcgcactcaagaaaatagtcaatttgacccctttgcactttaaaaacttcaagcaatacaattattaatagataccggaatccttcttcgaataaaatcgctcctaaactccataaaacagctcgttcagttgggataatttccgagaagtcccaattccaaaataattgcgaaaaagttggtgcaatataaacatagctatgaaagaaggaataccaagcagcaaagaatacagctactaataaaactattaactgtatatttgaatatcgcctaaatttaagattaagctttgctcgaatatcccaacttttaaataagcaaaatatgattggaattaacgctaacccattaagaatttcagagtgagaccaatttacaaaggatgataagtagtcattcatatgtaagttttcgctaaaaagtaatagcacaatataatacattgcaataaaaactctagcatacttattcttaaccaatcccgcattagtaattactaccggaagcaaataaactaagaataacaaactataaattctagctattaaaacacttttaacaggatattttaccaataaaacattagctacagtatttaagcaataagtaaaaattgctggtaatatcataagattgagccatgatagttttaaactaatctcaatttttcttcttaaaaaattccaaataagcaatagaagtagtaaaaatacaacgcctacatctaataaatttttgaatgaattatttattactagaaaaacagcagcaataatatttaatacaagctctattaaaaatatgattttacttttcttcataaaattcgcatcccaaaataaaaagagcaatgaaaattcattcatcgcttctatcacttagccccaatgtgtatgaccaggagtaatgccccatccaccaggaacatcgccagtattaggtgcctgacgaattgtattatttacggaatatctattattagtcgctgcagaagctacactcgaattaaaaaacaaagtatttcctaatactactaaacttaggcttaacaaaatctttttttcataatttatatctcctcgtactgtatgaactcagagttattcaggtaaaactggataactaacaataatcaaattactatgcctctctttcatatttaattaactatgattttatctacttctcattccacagcaactcaatcccctctcaggggattaattaggtaaatcattagcaagattttgataacctgatattttaaggacatttttgatattagttgagacagaaatgtttccttcataaactgctaaaaaatatgcatttaattctcgaataatgcctaactcaggaacaatcgatgttgttttaatccagcttataatttttagcacagttttattaaactctttacttaactttcgaaaattaaataaataattaattccaaccgttgctaaccttctttgtttttcgattttttctttatctagatctttatattttctaattagagtcaataccaaaggactcatatttaatacattactagttctaataatattacccaataatattattgcctcgtcatactgagtccagttgtcatgtttgaaaatagaattaatgattcgagcatcaacattactctgtccctggttgtctatcatatccacaattaatgttgctctatctctcaattcattgctagaactcttatctgaaaaaatttgtcgttttatttcttcagcagcgatcttatctttttcgtaaaaagcaatatttaatatttctgaataatttacttctttttcactattttcatcattaagatagtgatcaacaaaatatgataaagaaatatttcgttgcttcaatatctcgactaggttttcgataaatatcctgttttgtcccttctctaatttagaatagtgactaacagttattttcgtcccctgaatcatttgcttttgtgtcaaacctagatcatctctcaaatgtcttaatgccgttccgatatccatagttctctttaatttatccgcttatattttcatcatttataataatcatatatcgtagagaagaaaatattttagagtaaaggattttttatgactattggacaagcactacgaaaaattagacaaaatctagacctcactcaaaaagaaatggctgctaacattgttactcggcctttttatgcgaaagtagaagcgggaaaaagcagaattagtgcagataaattagccgcgattctttttgaacatgatgttgatattacttacttttaccaattattgcgagcaacctatacttcaaagcaaaaaaagattgaatcagatttaaataataaaatggaacaagccttcaatgtaggaaaaattgatgaaattgaatcatgctatcaagaaattctgtcacaatctcactctaagattttaaaattaagagctatgatttctgtagcatatttaaaaaataaattaaatcaaatcgatcccaaaataaaaaaagatctattcattgaatttaacgaaggacaaaactggatgactaatcctgaattactgcgactttttactaatacaatgccgctctgggaacaagatacccttgcattttttatcaatagactacttaacgagatgaaaagcaataaaaatatctccgaattagaacaagaaagatacttgcgtgtcttcgagaattatctagcggtttgctataatagaaaactttctaaaaaatcacttcaattaatgcatgttccaaaaataattgactacatcatggaatcaaaaccaaccatacattttttgctttataagattgctgctttatatttaaagaatacgcgtggtgctagttaaatcgttttagttaataaaaaagtccaatcttgttagactcaacttgtataataatagaaaagagcctgatctgattgaactgccttaagcttaagcgttttagccaccatttacaagttagttttaaagatttagtgataatttgtcggcactggtatcgtttgtatgcaccggctgagtttactcatcggcgaaatattgatcaaattaaaactacggacagtctgattttggctttacttatctggcaagctaagacaggaattgaatcacaaagaagattctgtgaatgtttcaattgtttatcacactcacgttttaatcggcgttcacgtcagctattgcaattgatttatcagatacggcaagaaatgaataaaaaggttgacctgaatggacatttcttgatcattgacagctttccggtacctgtttgccaaccaattcgcaactatcgtgctaaaatttttcgcggttatgccaacattggttataaggccaccaagaaaatttacttctatggtttcaaagttcatgccattgttagcgatgacggttacattcttgattatgtcgtaacaaaagcatcagttcatgatgccaaggagacagttgaactgctggaaaatgcccatccatctaattactatcttcttggcgacgaaggctatttaggcaaagaactgcatcaacagctaaaacaaatgggttatgaactttggacaccatatcgtaaaaatatgacaggagctaaaaagcacaatgatcatcaattgatggctattcgcagaacaattgaaagcgacttttcgcttctgacctattacaatgccgagaacaatcgagcacgtagtctgataggctttcaaagccggttggaaattgtaattttagcttataatttggcttattgtctagaacgatttaactagcaccacgcgtttaaagaatttatttttaaacaataaagaggaagcgcaaaaaattagaaatgaagtacaaaaatatggttatcaagatttaattaaaacttggcccaaataatttgtaaactatgtgatacaaaattaatctgttctagtcactaaggagtagtatttaaccaaaccgactaaatgattaaaaaagggaggaggctacagtaatgtggtggcaattaccggtcattatcccagcaaaataatagaagtttaaaaaatattaggaggatgcattaatcatgtcaaaaattaaacaaagtacattactaatcttattggtagtactcgcagttattgcaattgttactaccgttgtgttaaaaaacacttttctcagctccggacattggctcctaggtgttcctatccgatggactattccttatttaagttggtcttaatttcataatttttaggagggatctttgtgaatgaaaaaatgatactagcaacacttaaaaatagaaaaagaaacagattatttctaacattcgaaggaatttacgctattattctattgttttccgttttattttactttccactattcattttagaattaaaaattcaattcattttgatttcgactttctatctaatcagttggggagtagctaagtttcacaaacgctcctaaagtaaatttttataagataaagatcggttcaaaccggtcttttttctacgtaaaatttttatctatacagccgcttctgccttagcttccttggataacccagcaagatcagctaacaaagtgaaatcaatttgcgttgtcaaatttggctttttacgcaagaaatcaatctcagatggttttacattttcagttggattatctttggaaatcaattcttgtgaaatctcactatcagttaacttttggtcctccaatacgctttctgcttctttgacttctttttcatattcttttgtcatacaaaaacgccttcttcaactctcattgtagtcaggtttatgaaaaggtatagcaaaacgtactttttattgataatttctgtatattgcttgtcaaattaagagactgtaaaatagtttgtgtaaggatgaatgattccttaaatttatttctttaaacattagaaaaaggagttcctttctcgtatgattggtttgaacaaaaaaacacatacagaaagaagaactccttcatgaatgattttaccaaagattttgctcaagctctattcaatccagacaaaataaatgatttattgcgcaaagagctacaacaggctgttaataacttgttagaagctgaattgactgcctttctgggctatgatccctatgccagaaatggctggaatactggcaactctagaaatggtgcttatttccgcaaagttgatacgcaatttggcccaattgaagtgcaagtgccccgggatcgcaacggtcaatttcatcagcacacgctgcctgactacaagcagcactcggatatcttggaaagcatgattatcaagctttactccaagggcgtgaccaccagggaaatagccgatctaattgaaaagatgtatggcagccattacagtccagctcaggtatcaaatatttccaagcagatgattccaaaggttgaggcttaccacaaacgcaagctaagcgacaagtttttctgcgtctatttggatgcgacataccttcctttgcgccgagaaacatttgagcgtgaagcagtctatattgccattggcatcaagcctaatgggcacaaggaggtcattgactactgcattgcgcctagcgagaacattgaagtctggacagatatgcttcaaaacatgaaatcccgaggcttaaagcaagttgagctttttctttctgatggtgttgttggcatgaaaacagccttggccaggacttatcctaaagctcattttcaacgctgtttggttcatgtcatgcgcaatatctgcgctaaagtacgcgtcgacgatcgtgaaaagatcatgaacgaattcaaacaggtgcatcaacagacaaacaaagaagaagccacagctgtcctgcatgacttctataccaaatggggcaaggtttacagccatgttatcagaagcttgaaagacatagaaccagatctgctggtcttttataactatcccaagcagatcagagcttcaatttattcgactaacatgattgaatcatttaacaatgtgatcaagcgcaaagctaagcctaaggcagagtttccaactgaacagtcgcttgatgcttttattggcattcaggcaatgagctacaatgaccgttatttcaatcgaattcataaaggctttggtcaggttcaggacaccttagaatcctactttgattaaataaataattaaaaaatcaatttacgagaaagaactatttacacaaaagatttgacagtttccaaattcaacgagaatctatttcagtttatattttgtattaaatgatgcacctaacttttcaatcttttacttttttataaatttacgagagataaatataattccagcaaagaaaaacagcagtgaaatgcattttcacatcatgtatcattaatttagaaattgaaataatgaatatccgtaggaggtaactaatatgttacaaaagaaaaaagttgttaaattactatcgaccattacactttcatccactctattgctttcagctacagttgttacaagtaacgaacaagctaatgtagtggaagcaagcactaaaaatgtaagacttacgcataatgcttatgtctataactacaaaggcaaccgtattagaggtgttaaattactcaaaaaaggcaaatatgtaaaagcctatcgcactaagaaaatacgtggcacaaaatatttatacattggtagtcatcactatatcaggctcgcaaatgtgcaaaacacaaaatcaaattatttgttcactgcaaaaattacagataatggattgggtgaaacatataaagctcccaatcaatcacctactggcgaatacattggagtcggacaatctgtaaaagtttatgctcaagaaaaagttaacgataaaatttggtataaaattggtgataacaaatggatacttgctactgacactgataaattttatacaaaaagaaatagttccaaaaactgtcaaaaagcagattcacaaagtattactcaacaagataataattcggcttcaaatgaacagacgtattcaaatatcataaactcaaactttgcaaatgaaactgaacaatcttttgtaactcaattaaatgaattacgtagatccaatgggttagcgccattaagcatagataatacacttcaatcttatgcagtaaccagagctaatgaagccaatactaaatttgaccatattagacccgatggaagtagaactcaatatgcagaagtacttgcaggaggaacagttaacgacacaagtacaccagagcaagaagccagccaacaattgagaagcttcatctatcatgatgcaggatctaattggggacatagagacattcttttatctagtcaatatacaaaaattggagttggatttgctttcgatcccgtattaagtaacggatttttagggtacagtcttattgctaatctgaaataaggaatataggaggtaactaccatgttacaaaagaaaaacgttactaaattactatcaaccattacgctttcatcagctctattgctttcagctacagttgttgctggcaacgaacaagccaatgtagtagaagcaagcactagcagcgtaaaacttactcacaatgcttatgtttacaactataaaggcaagcgtattaaaggagcaagaacactcaagaaaggcagaagtgtaaaagcttaccgcactaaaataattcatggtaaaaaatacttatatgtttatgcagaaaagaaggatagccgtggtaaaacatggtacaaagttggaactaacaaatggattagttcagaattaactcacaaagtttcagaacctgacacttctaaaacatctgctattactaaaagtacatccgatgaaacaaatactcaaagtgctaattcaagcaattttattaagcataatgaaaccacaaatacaaaacccaataatgaatatacaaacattaaggattctgattttgctaccaaattagaacaagaatttattgcgcaattaaatcaattacgtcaatcaaagggactaaattctttaacacttgatacttctctgcaagaatatgcaaggactagagctaccgaagcaaatacaagttttagccatacaaggccagacggaagccgcactcaatacgcagaagtgcttgctggaggtgcagttgataatactgataccccatctacacaagcaaaaatttgcttaaataatttcatttatcatgatgcaggatctaattggggacatagagacattcttttatctggtcaatatacaaaaattggtgtaggtattgcttggaatccaaaatctagcaatggattcttaggatacagattaatagctaacttgaaatagcattgagattaaatagaaagaactaatttccagacacttatttttcatgggataattacaagtttccttcttatcaaggaattaggtttgtggctgaattgaaataattttaataatagaaaatagtcaatatgtataaccctacaatatggctatttttttgcacaaaaatccactgaatttaatttaaacaaaatgccctaaccaaacacaaaaaaaacaggctccaacgcctgttaaatcactatatttagtactcttaattttccttcaagcacattcttaacacatgaatcgtatctgtgtgtttgaattgtgttaatttcaaataaatccttattatttcaaagaatttcattctagttcaaagtagcaaaaaagcctttcaaatcaagcttcattgaacttatttgaaagacttaaacgtatttctaatgctgactagaagcgtaaaaggcttaacaatttttgcttttaaaattagcactctttaggatttttctagaaaccgtgtggcacatattgttatatacgtaatacaagtcaatatcaaaaaataactttatacatatcttttttgtgtaaatacacatataaattaaaaattatgtgtaaacatattattaacaataaagaaactgtcaaatcttttgtgtaaatagttctttctcgcaaattgattttttaattatttattcaaaataagattctaaggtatcctgaacctgaccaaagcctttatgaattcggttgaaatagcggtcattgtagctcattgcctggatgccaataaatgcatcaagcgactgttcagttggaaattctgccttaggcttagctttacgcttgatgacgttgttaaaggattcaatcatattggttgaataaattgaagctctgatttgtttgggataattgtagaagaccagcagatcgggctcaatttccttcaaacctttgatgacattgctataagctttattccatctggcatagaatttgtgcaagacagctgcagcttctttttggcttgtctgttgatgtatctgcttgaattcgttcatgatcttttcgcggtcatccacccggactttagcacagatattgcgcatgacatgaaccaggcagcgttgaaaatgagctttaggataagtcctggccaaggctgttttcatgccaacaacaccatcagaaagaaagagttcaacttgcttcaagcctctggacttcatgttttgaagcatctctgtccagacttcaatgttctcactaggagcaatgcagtagtcaatgacttccttatgtccattaggtttaatgccaatggcaatatatactgcttcacgctcaaacgtttctcggcgcaaaggaaggtatgtcgcatccaaatagacacagaaaaacttgtcgcttagcttgcgcttgtgataagcctcaaccttggggagcatctgcttggaaatatttgatacttgagctggactataatgactgccatacattttctcaatcaagtcagcgatttctctggtagttacgcctttggagtagagcttgataatcgtgctttccaaaacatcagagtgctgcttgtagtcaggcagcgtgtgctgatgaaactgaccgttgcggtctcgaggcacttgcacttcaattggtccaaactgggtatcaaccttgcggaaataagcaccatttctagaattgccagtattccagccatttctggcatagggatcatagcctagaaaggcagtcaactcagcttctagcaagttattaacagcctgttgtagctctttgcgcaataaatcatttattttgtctggattgaatagagcttgagcaaaatctttggtaaaatcattcatgaaggagttcttctttctgtatgtgtttttttgttcaaaccaatcatacaagaaaggaactcctttttctaatgtttaaagaaataaatttaaggaatcattcatccttacacaaactattttacagtctcgctttttgacataatacttatcttccattcaaaatttaagtatgcattaatattatttattttagtaaccagtcaatgacattaacttggctaattccattatcatcataacttcccggatcttcggtaagtaatatcttagggtagttatccttaatctctaaaaaaggtgctatttctctttgataagttttttcattctgaaccgttaaactaacttgatagtattcccgaataccatcgcgaatagcaacaaagtctacttccttttttcctaaatttcccacatacacttcatagccacgtctgattaattcaagatagattatgccctctaatctgttccccatattaggacgcttttgccccaacaacgctcttcttaatgaaggatctaccatataatacttattgttaatttgtaaatactttttaccagcaatatcataacgatcacagcgataaaataaatatgaatctaccaatttttctatatacgccatcactgttgcgcttgtcgctttaacgccattattcgatagcacattcgctaccttagttggagtaattaaattgccattagtatcggtcaaaaaagctgcaatatgttccaacaaggtagtatttcctcgttgcattctagctaagatatccttaaccaagacagtgttaataattccttgaatataagacagataggtattttcatcctctaattcagtagcaaaagggaatcctcctcgctctaaataacgattaaaagcttcttgatgggataactcaggaactgaggctaaaaattctttaaaagaaaagggatatacagggatttcaatatacctaccagccaataaggttgctaattcacctgaaagcataaaagcattcgatccagtgacataaagatcaacattttgcttgataaaaaggctatcaatagctttttcgaaatgagggatgtcttgaatttcatctaagaaaatataattcattttatctggaatcaatcgttgatcaatatattgatacaattttaaataatcagtaattgtagcaagccctaaatcttcaaaatttaaaacttgaatttgttcctgcttaacacctgctttaagtaattgttcctgatatagttttaaaatcgtggacttaccagaccgacgtactcctgttaaaactttaattatttgtttatcacgtagtttattcaatttatcaatgtatttaggccgcggaagcatttttaatcctttcaagttaatgtaattcaaattagtttaattttcacgtcaattttagcatataattcaaattagtttcaatctcttaaaacttctgagatgagttttaatttaatttgaatttactcaaaggcttaccactaaatttaaataaaaagaaagtctgtcaatctaacaaactttcttttttcataaataatcgttaactacatcaacttatatttcttcatcaattcttcgatataagtgcccttaaccttcttaagcatccctttaatcgcaaacttttcaggcattggcaaatcaagatcagccaacttcttctggtcattcaggtaatacatcgcattcatcaacattctgacatcaaatgcggaagcgaagacttctggtacaccgcggtcaatattaagcaaagtgtagacagcttccattgccgtccgaactgaatactctgtcgtaaagacagtgtctcttggagtttcggcaaagttaccaataaaggctaagttcttagaatgatctggaacaacctttgggcggtcgcctaaagctcttggcataaagtaagaagtaatatatggcatgtgaaccggaattgttgtagctgcggcagctatttcaggaattctttcttccggcacacccatgtgatagagccactcttcacacatttcaagcccattacaatcaggcatcgtcttttccacataattacccttggtatcagagaataaaccatataaccaaacaattaattcatttggtttttgcgccttaaagtgtggctgacggctgattgagtaacctaatagccaattagaatccttaatagtagttggtccactagttacgattgagccactgtgtggatcctttttattaacagcttcaataaatggcacaacatcatcattcttaaaggtaatagttgaagacatccgccagttagcctttggaatatccttgcaaaagacatcaggatggccaaagtcttcatcttgagctgctaagttcttccacaatcgccagcttgcacccaattcatgttctgctggagcgtgatgcagttgatctccataggtagtactctcagtaattgaaccattagtaacgaagactaagtcatttggtgttaagtcaatggtcttcttttcgccatcttcggttaaaataatttgtttagcaaccttttcgccgtcagagcggttaacaaagatattatcaaccaccgtattatagtggaagattacaccacgatcctttaaatacttgaccagcggcaaaatcaatgattcatattggttatacttggtaaaacgcaatgatgaaagattcttcaaggttgctacatgctgtacaaagcgcatcaagtagcggcgcatctccatcgcacttgcccatggttcaaaagcaaacattgttgaccaatataaccagaagttagattcaaagaattccttagtgaagacttcattaatcttcttattttgcaagtctttttcgggagttaaacaaagatcaacaatttccttcactgcctttggtgtcaaaagaagttgcccatcagtcggcaaagcttgaccacgatttacaattactctagttttagcataacttggatcttttctatttaaacgatagaaggaatccaaaatagattcaccttcatggtcaggcgaagggattgatctaaataaatcccacaaacattcaaagtgcggctccatttcacgaccgccacgaatgatgtaactttccttttctttattatagatcccatccattgagccaccaggcagacctaattcttcaaaaatgtgaattttcttgcccttcatttggccatcacgaattaaaaagacagcagtagctaatgcagccaagccactaccaacaatataagcagatttttgatcaacatctttaggtttatcagccttaacaaaggcttcataattgccattactataatgcataattgacacttctttcaataatcgttacacttgtaactatttatgcttataaaataatgtaagcggtatcagttgtcaaacattttacatttggggatgatcttgatgaatatgaagagtctgcatacgcagcaacaaattgaacatgcattattcaaattactacaaaaaaagccttatacggagatctctattgcagaaatcacccgtaaggctaaggtatctcgtacttccttttatcgcaattatgaccaaaaagatgaagtcattgcgcaatttttatttaatcaataccataattttatcgctgatattgatcaacataatttgagaacttttaagcagcagcttactgcctaccttgaattcttcaaagataatcctcaactaatgaaattactgcttgatgcaggatttgaaggagaattacttaattttcaaactaaatatttgaaaaagctgatgtcagtttaccattctgatgtccacctacccgactatgcaatagcctatcaatctggtggaatctatatgctgttagtctggtgggttaagcaaaattatcagaccagcttgactgatttaatcacttatgccgaaaaacacattatgctgtaactaaaaaagaagagctcacaaatcgagcttttattttcaaaattattacaatttcttgcattttttaccaaagttaaagtagaaattcattacaaaggcgataattaacaaaatcaatgaaaccaacataatttccttaataccgccgtggaaaatagttctcattgttggcactaagttttgcggcaaactcttggcactttgcgcatcactcaatttattcatcatggtcatcgtgattcccttgtgcgtttgaactccgctggcccagttcagattcataattacgccataaacagcagccattactgtttgagctaaaattctgatcaaatatgaagttgaagtggccgttgccatattctttagtcccgcatcaagttgtacctttaattgcaaagcaacaaagataaagccaaccccaatgccagaaaatgcaccaataaaggtcaacatctgcacaggcgtatgtatgccagaaataaacaaaccagctgatgagataatcatggcaactattccaatcaaaactaatttaaaggttgtcatatgctcctgaatcgctgctacactttgagatgcgataatttcaacaatcgaatttggaattaacgtcatcccaccaattaaagctgacaagcctagtaatgcctgagcccacattggcatataggtgtttactgctaaaaaggcaccccaagtaaaggcaaataataaaaagtcgccatctaaatctttatttttaaataaagaaattggaataattggattgtctgcatgaccttcgcgaataaagaaaaagacgatgaagactaaactaattataatcaatccaattatgatccagctagcggttaaaccaactagttgcacgcccatcaagaataaaagcagtccgattactaataaagtagcaccagggatatcgaaaaccggtgtcttttttggagtaaccggtttgtagtaaattaaacaaatcaaaaatgcaattaagccaattggaatattgatatagaagacccagtgccaagagaaagcatcaattaaccaaccaccaacaagtggccctaagatcgcagccccattccagctggcagttaaatagcctaatactttggttctcgttttaatatttttaaacacataaccagcaatgatataaggtaaagaacccataccacctgcaccgattcccatgataaagcgagagcacagaaagaaaataatatttggcgctatcccttgtagagccgatcccaaaacaaagagtagcaatgaaagctcaaaggctcgtttgttagtgattttctctccgatcttggtccaaatcggaatcgaaatcgacattcctaataagaaaattgccacaatccaacccatgaattgaattccgtgcaaggccgcgacgatggctggaatagcggtattaataatagttccgtctagccccgacatcacgttgccaagcatcaaggctgccgtcaccattgtaatctgttttttattcatgcttaacttctttctatggtatgtaaaaagcgttagacaaaaatttctaacgcttttgagtaaaaaaatatggaggatacagggctcgaacctgtgacctcctgcttgtaaggcagatgctctcccagctgagctaatcctccattatggggcggaatgtgggaatcgaacccacgcatgctggatccacaaaccagtgtgttaaccccttcaccaattccgccatcaacggtccatatgggatttgaacccatgatctcctccgtgacagggaggcgagataaaccactgctccaatggaccaaactagaggaggatgtgggatttgaacccacgcgcggcagaaccgcctaacggttttcaaaaccgtccccttaagccacttgggtaatcctccatagccgaacagatactagtataccaaagtgagaagataacgcaagaccttttttaaaaaaaagcaaaaaaataaagcctttcggcttcattaactatgtaaatttttctggaacagcaaatacttatattctttgccagcaatttcaataaaacgttgggtagcaatattacgccagccaaagtgcttaaagaattcttgtgcatctttatcttcagccagacaccacaagtaaatcttgccatagcccatcttcttcagttcattttctgcggcatttagcaaggtcttacctacattgtagccttgaaaatcaggtttaacatataatgccatcaactcaccgcagccaagcattctagtgtcacgtggacgaccatagctaacggctgcttgaacctcgttattatcgtctttaaaaactaaattatgacgaccactctcattgagtcgttttacccaagcagtagccggaatattatccaaaaatacatctggtagcacgcctttatacgtctcttgccaagttgtttggaaaagcttacttgtttgttttgcttcgtcttcactaattaatggtttaataatcatatttacttcttctttgtcaaaacagtcacagcctctacatgtggcgtttgtgggaacatatcaacaggatcgattcgcttaaattcataaccttgttcttggaacaaaagcaagtcgcgaatcattgttgcaggattgcacgaaatataaacgaccttcttaggtccagtcttaactgtcgcattaataaattcaggtgtcaacccttttctcggtggatcaacaaaaaccacatcggtcttcataccctttttagcccaacgcggcattatttcttcagccttgcctaagtaatactttgcgttttcaataccatttagctcggcattgtccttggcatccttgatcgcatcccggacaacttcgattccacgcacggccttcacatgcttagctacactcaaaccaatcgttccaattcccgaatatgcatcaattactacatcatccgaacctaaatctgcttgcttaatcgctaaatcatacaagcgcggtgtttgcagcgaattaatctggaagaaactttgaggtgaaattctaaactttaaatcaccaatttgatcagtaatctggtcattaccgaaaactaggtaatcctttttacccaaaatcacattggtcttcttaggattatagttcaagactaaacctgaaaccttaggaatctggctaatctcagctgcaacacccatcatttgtgggaaatccttaacccggctgaccaaaatgaccattatctcgccattagccttactacgacgcacatcaagatagcgtataattcccgtattgtttacctcgtcataaggcgcaatcttgtacttgcgcaacacatcacgcactgcaaccaatacacgatcaatttccggatcagtggtaaagaaatttgtcaaaggcactaaatcatgtgaatgtcgtctaaaaaagccaatctcaagctgtccattatattctcgcacaggaacttgggccttgttgcgataccctgtttgctcaggactaggcaaagtttgtcctacttcaatctcatctaaatgtgccttcttaagtaagttaacaacttgattacgcttgaattcaagttgcttatcatacttgatatgagctaaagaagcgagtcccgtttgaacccattgattcaacttgatcttaactcgatcaggactttctttttttatttcttcaattttagccaaagcaaagttcttcttaacctttaaaatctttgcactaaccacttcacctggaagtgcattagtaacaaatacggtcattccctcgtaatgggccacacccattgcttcatacgaaagatcggtaatttctaaatctataatttgattctttttcatactcactcaaccttaaaaaaatagctctctattattataatacttgaccaatctttgtgcttcaaaaaataatcgactgctttttagaaccaactatcacccatatacgcatgcaaaatgtggttagccgctactttcaacctcaaataattaatattattagaaaatagcataatcatacgcttggtcttgtaattcgcaacaaagcagcaattataaccagggatactgccattagcgcgaatgatgtcaccattaaaatacactccaccaaaataagctaccgtctgatgctgggcttggtggtaatactcgtttaccattttaggatttttcagcacatcgttatatacaaacttccaataatcaattggtgacatgaataagttccctgctccaaagtccgacgacgtcgtcactgtcacttggtgccagtcaacatttttactcattggctgagggatctcgttttggttaacctcagaaaaatccttaactttctggagcttaagtggcttagcaaaatcggtctgaatataagcattataacttaaattagtttgtttgctaataatagctgctagcaattcataatcaacatcttggtaatcccaagtatgaagatgatcattctccatgtgattaagcatataagctatttgctctttctgatttttaagcggagaagatggtcgagcattgttaaccaagccactagtatgattcatcagctcacgaattgtaatatctttactacctgaaacttgaggataatagttagataaagaggtattccaacctaataacttttcttgttgcagctgataaattgcagttcctgtcataattttttgtagcgaagcaatcggaaacaattgattagcgttaactatttggcttgaatcagtggtctccttattttggacaacaatcggttgcccctttttatcattaattaacattacaccgttgatatgatgaaacttcatataatcatgcagctgttctttctgattcttaatgccattatccagcttatcccctggctgcacaatgaataaaaatattgcaaaggcacaaagtgccaaaaagatggataaagctcgttttttatgcataaagattcctcttaattactatcccaagcaatgtaataactatatttcctcaattgtaaatctagtatctaaatagattcaactattgtgtgattttatgcaatgaaaaaacatgcttcattagaaacatgttttttcaagtcattttaataaaaacatgaacagcataattaccgcaataaatttcactgctcttatttcatgcactatactaaaaatagcttttctataaatacgtcacattcaaaaagattttgcttaaatctattgacagatatttttaatcttgctatcatattgctcaacaagaaacgaaaagtagcaactttgctcagcgttcagagaactggtggtagctgcaaaccaggcaggcaaagcttgacgaaatacatcgttataatgttgttcggaaaaattcagaaccgttaccatctgatagagattcaagttcttatgcttgaaagagtgggtggtaccacggctattgtcgtcccgttgactaataagtcaacgggattttttatttggaggaatataaaaatgaagaaaaagaaagtttcctttactgaatcaattattatcttaattgcactcctcactattctgggattggcagttatcaagcttgccctttctccagaagtgccagttttattcattgtccttttacttaccttttgggctagactgcgtggcttttcctggcaagatgttcaagatggcatcaaagaaggaattagtgtagccattattccgatttttatctttattttaatcggcgctttgatcgggatctggattaaagcgggaattatcccttccatcatggtcctgggtttccacttaatcagtggtagtttcttcgttccatctgtttttattgtttgttcaattattgggatggcaatcggtagtggttttaccacaatctcaactgttgggattgcgctttttgggatcggaactagtatgaaccttaatcctgccttagttgctggggcaattatctctggagctgtttttggcgataagatgtctcctttatccgattcaaccaacctttcttcagcagttgccgaaagtgaattattcgcccacattaaaaatatgatgtggtcaaccattcctgcttttgtagtttcattaattttattctggatcttaggcaacagtggcaacatggatccaactaagattgaacgtacttcacatattttacaaactaacttcagtatcagctggtgggcaattgtcccaattatcttgatgatcttttgtgcttggcgcaaaatttccgcaatccctacgctctttttaaacattgcgattactgtaatcatgatttttattcaaagtccccacgaatctattcaatcgcttaacaatttagttatgaacggctttgtggctaaaactagtgatgcttctgttaatgccttattaacccgtggtggtatttccaacatgatggctacagtagctttgatcatttctaccttatctttgggtgggatgctcatgaagttcaacattgttcaaagtgcaatggaaccactcgttaaacatttaaccaagcctggtcgtttaattacggtcaccattttatctggtatctgtatcaacctttttgttggtgaacaatacctatcagttatcttacctggtcgtgcatttaagccggcttttgataaaattaagctttcaccattagcccttagccgcgtacttgaagacggcggtagcgtaattaactacttaattccctggggtgttgccggttcattcgccgcttcaactttaggtgtgccagttttacatttcttaccattcgtcttcttcagtcttctttcaccaatcttctctattttgagcggaatcaccggaatcggcttgaagtgggctaaagaaaagtagaaaataatcatatcagtaaaaaagttcctaagaccatcgtctttaggaacttttttacgcaatctactagctaacggttgtgtcatgttgcaaccaattattactcttttcttgacattaccattcgatcattcacagcagctctttttggtatcactttataacctcgtcaaattcacttcaccagccttcatttttgggattgtctttaccgtaattaggaaaaatgaccagcaggcaaaattacctttaaaatcatatttttccgaccagtgggataataacttctttcctacttttgcttggactttattttatctcattgctatgcctaatctgcagcaacacgggcattttcacaatattgccacattcatctggcaattcttcagtgataatgccacacctcatctttggtacagcgtcatgatgctgcaatttttgcttatcatgcctggaatcaaatcagtctgcaactgggtccagcattcttatcgacgactactaatcgcagttattagttccggaattatttactttgcctggttaattttttatgatcacttcattttaaatggtcccgaggctacccattggtatttattagatcgtatctttatcagctttttgatctttgggctctacggtggcttaagctggaattttcatcatgaaattcaaacttttctgtttacatattggtggctaattgtgggattttaccttttaacctattttgggaccagagatttatttttagccactttcaaattaacagacctaaccaacgacagttattacctaccttcaatggcaatttatgctttagcggttatcctcttgatttacctaatctgtattgcacaaaaagtctttaatatgaactactggctaaaatcaattcactttctagctttttatgcttatcgagcatttttagccaatgttttttgggatcgtatcttttggcaatattttaattttaaacagctagctttacaaaatatttatttagctgtcttactactttggatttgtacatggtgtgcttcatatttatctgtttatgtagttcaccacctttggcttaaaattaatggttctgtcggtccatcctaatttgcgcacgtcgatattcctgactgtcacgcgtaggttgagcaactatatctgtaattattatttcatgatcatttcgttcaaagacgattgcttggtctaattccgcatttacttttttattgatagtggtatcttgattaaattttaaatcatccagctcccgatcaataaatgttttttgcgaactcgtcagctgatgatatttttctgccgcttctggagtaaaggacaagatcgtctcccgtctgaattcacctattttatctggatattcacttctttgaccacggatgtcattgtcaatatatcttttttccatcaaaatcacttcctttatatcttcactatacaggaggcgattttctttagacatctttctgcctactttagttttttcataagaaaaactttactattattcatttgaccactaaatacggtaaaatagataagacaagtaaataaaaggagtgtatatttcatggataacttttcaaatactccaggacggcgtcaagtccaggatatttctgcagttaacagcttcttgactaagatgtacagtctcatgattttggctgttttagtttctgcagcaactgcattcttgactacgactgtgtttgcatctgcaattgctaacatgtcacaagccgtttactggatcatcgtatttgttccaattgttttatgtatgacaatcagctttaaggcagcaaagaacccaacattaggcatcgttcttctgttgattctttccgcagtctacggcttcgaatttgcctttatcgcaggagcatttacttccgcttcaatcgctggtgcctttttatcagcagctggcgtgttcgcagcaatggccgtcttcggttctgtaactaagcgcgacttgagcaactggggttcataccttggcgcagctttgatcgggttcttagttgcatggctcgttaacgccttcttcattagaagtggcgctgcaacctttatcttctcctgcatcggtgtgttaatcttcactggcttaactgcctacgacgcacacaatgctaagaagattttcatgacctacggcggtcaagtttcagatactggtttagccgttatgggggctttaagcatgtatctcgacttcatcaacatcttcatgttcttgctacaaatctttggcatgggcggagatcgcgattaattaatttccatacaaacatagcgttgattagcttttacactagtcaacgctatttgttttgcttaaattttatccaccaacataaaattcgatatgttgttgtaaattgttgaattcaactggacaataaccaccaatttcgccatcaaggttaactggcaaatcttgtccttcacttttaccaatcaattccgccttcaagctgcgggtcttggtataaatgatatttggatcatcaacgtgcttaccattcaaagccaatgccatcaacttcatcatgctaacagggtcagaaggcttgaccacgatcaattggaataatccatcactaagctgtgcatcaggcataacttgctcaaaaccaccaattgaattagtcattcctagtaggaacattgataattttccttcataaacgccatcatcataagtcaaacgcatctcattctcagtcaagtgtggcaacatttctgcccccttgattaagtatgcggcataacccaaagctgacttaacctcagatggtacgccatatgttaactcagttaaagaaccgctggcagcaatattaacaaaatattgaacctggtcaccaaaaacagctttaccgatatccattttacgagttttattctttaagattactttagcagcatctggaatattatcacgtggaatggctaatgcacgagcataatcattagtagtaccagcaggaataattgccattttaggcctgttttctaaaaaggcaatcccgttaactacttcattgattgtaccgtccccgccagctgctacgattaaatcaaaaccttccttagcagcacgagtagcttcattgcgagcactattttctttaggtgtagttctaaaagcactagcttcgtagcctgcttgttctaatacatctaaaatatcggccacattctttggcatctgttcgtgacctgatacaggattataaattaatcttgcttttctagtcataattactacctaacgttctaaaaattaacgactttgcaattcttggttaagtaacttgttaaccatcttagggttagccttaccacgagtttgcttcatgatttgaccaactaagaagccgattgcacgatccttaccattcttaaagtcttcaactgattgagggttatcatcaacaaccttcttaaccattggagctaaaacagaagtatctgacaattgaaccataccattatcttcaacatacttcttaggatcagtaccattttcaatggtttcagcgaagaccttcttagcaatcttagatgaaatagtaccatccttaattaacttgatcatttctgccaagtgttcaggcgttaacttaatatccttcaattcaacacggtgatcgttcaagtaaccattaacttgtgtgttcatccagttagctgccagagttggatctgcacctgccgcaacagcttcatcaaagaagtcagaactttccttagtttgaagcaaaacgttagcgtcatatggcttcaaaccatatttatttacatagtcatcgtaacgagcaaatggcccctttggtaattccttagcaatttcatcgatccattcttgtgaaatatgatctggtgcaatatctggttctgggaagtaacggtaatccgatgcaccttccttaacacgttccaaaacagtcttaccagttgcttcatcaaaacgacgagttgaaagttggatgtgaccaccagccaaaagaacttgttcttgacgcttttcttcatatgcaagtgaacgacgtacgtgatcaaatgagttcaagttcttcatttcaaccttagtaccaagttccttttgacctgcaggacggatagaaatgttggtatcaacacgcattgaaccttcttccatcttaacgtctgaagcaccagtaaattgaacaatcttacgtaatttttcaaggtatgcgtaagcttcttcggggtcttccatgtcaggttcagaaacaacttcaagcagtggaacaccttgacggttcaagtcaacgtatgagaaaccgttggttccgtgagtgttcttaccggcatcttcttcgatgtgcatttcgtggataccgattctcttcttcttaccgcgaacttcaacttcgatgtaaccatcacgagcaagtggttggaagaactgagtaatctggtaagccttggggttatcaggatagaagtagttcttacgatcaaaatgagtagttggcaaaatgtgagcgtgggttgctaaggcaaccataatacctaaacggtaaacattcttgttaaccattggcaaggtaccaggcatagcccagtcaataacattagtctccgtgttttgttcagcaccataggttactggtgaaggagagaaaatcttgctctttgtctttaattcgaagtggacttcaagtccgatagtcgatttaaaattcattcaattagtcctccattccagttggtgttttttcataaaacttgttagtgcgttcgataaagtcagcagtcttgaagacattaccttcatcaaaacgcttagccataacttgtaaaccgacaggcatcccatcaactaaaccagctggaacactagctgcaggaatacctgctaagttggcagaaatagttaaaatatcattgttgtacatcttaattgggtctgaaacttcttcgccaataccaaatgctggctcagtagtagttggtccaacaattacatcattttctgcaaagatcttgtcaaagtcatcacagatcaaggttctaaccttagcagcttgtctaaagaaacggtcatatgaaccagctgaaagggcaaatgaaccaagcataattctacgcttaacttcagcaccaaagccttcagaacgtgatttaacgtaaacatcaagtaagttcttagtgtccttagcacggtagccgtaacgaataccatcgtatctttgcaagtttgaagaagcttcacttgaagcaatgatgtagtagtcaggaacaacgtatttagtatgtggcaatgaaacctcattgatcactgcaccagcatccttcaaagcatcgatttgcttttgaataacttcacgcatttcgccgctaactgcttccatgtattccttaggaacagctacacggagacccttaacatcttgaccgataaacttggtaaagtcaggtacttcacgggttgaaacagttgagtcatgctcatctgcaccagcaattacgtttaatacttcagctgaatccttaacgcgcttagtcattacaccaatttgatcaagtgaagaaccaaatgcgataagaccccaacgtgatacacgaccgtaagttggcttaataccaaaaataccgttaaatgcggctggttgacgaattgaaccaccagtatctgaaccaagtgctgctacaacttgaccactagcaactgcagctgctgaaccaccagatgaaccaccaggaactttatctaaattccatgggttgtgagtagcaccataatatgagtgttcagttgatgaacccatggcaaattcatccatgttggttttacctacaaaggttgcaccagcttttttaagcttagaaataactgttgcatcatacattggcatgtagttgtacaaaatgtgactagcagcagttgtcttaatcccgttagtgatgatgttatccttaattgcgattggaatacctgctaacttactcttggagtagtcaaggttatctgcaggcttagcatcatctaaaacagtgatccaagcatttaacttcttatctgtatccttaatgtttgccacagtgtctttagctaacttatctgctgacaagtcaccgctggcaagctttttgtttaatgaatcaatattttcgtttaagtaattcattactcgtcctcatccttattaataattacaggaaccttaatgtagccgtttgccttttcaggaacgttagccatcaatgtttctctgtcttgtccttgccagtgttcaggtttatcttctctgaagacagtatcacgatcaacaacttgaactgtttcatcaacaccctcagtatcaacttcactaagttgatcagccatattgataattgatcccatttgatcagtaaatttatctaattcttcttcattaaacgcaagtcgcgaaagagtcgcaacgtgtttaatggtatcttttgtgatttccacgcaaatacctcctattcgccgccataaacatggacttgataatcactatcgccggtttcttttgcaactaaagcttgtacatcatctactgaaccaattttgatttcaattgggatattgccagacaagtactttttagctgacgacaaaaccaaacgggtaaaactttgaatttgttcatagccataaaattgcgttgttacggaaatgttttcttgtgaaagcttaccgtttgtataacgcaaagttgccgttaccccactaatattagggaagtagttttgaatagccgtcttgaaatcattgaagtgcgatgcatcatcactgttaattgctttttcactaccagttgtcggtaaaacttgcattttttccgacatggatttccatttagatattttactactattagcggccgctgtcccgtaagcgaagtaagttccaccaactaatgaatcttttccagtcttggagaataaaccaatcgtaatcggaatattctttaaagctttcttcttacgcaagcgagcaacaatttcattagctattttttcaccttgagctttttgttcagcacgtgaaatagtagtttgaaattctgcaccgttacgctttttctgataataatcaaccgaattcatggctaagcccaagctcataccacctaaattatacttggaaccagatccagtcaaataatcttgttcgataatttcttccaaataaattggattacgcgtatcggttccggtcttaccattatttactgggtttaaaccatcaggatttgatttggatttacgcattaaccaatcagttacagttgaggtatccaaatattgtccttcttggaagacgtattgattaggcgaaaattgattcttagaaatttgaatcagccctcgctctaattcacgcgtatcaacagaattatcattatcagtagctgttaatcctgcaatcggactaatattatagcgaccatttttcattaaaacggtatagccattcgttcccgtgttagtagtttgatagctttttttcttagtggttgaagtggttgtcgcattatttgctaaactagaatccttcaacttaccacaaccacttagagtaagcgcgattccagctaaagccattacttgcaaatattttttcacaataattgtcctttattcaatttgtgcaattgcttcttcttcagtcaaaagtggtacgcctaaagtctgcgctttagtatacttagaaccagcatctttgccataaatcacgtaatcggtcttatgcgaaactgaacccgtaactttggcacctaaagcttgtaattttttcgtaaactcacttctagtataatgctctaatttacctgttagcactacagtcttatccttaaatggattatcttcaatttctgcaggctcatctgcacctaagtaatccatattcaggccgctctcacgcagctcatcaattaccttctgtgcttctggttgagcaaaatatgttgtcattgattccgcgatcgtcatgcctattgtatcgatagaagctatttcttgcacgtctagagacataatctttgccagatttttaaacttttgagcaattaagcgtgctgctttggccccaacatggtcaattcccaatccagtaatcaataattcaactgagttttgctttgaattgtctaaggcagttaacaaattattgatcgatttttccttaaaatgatcgagttgtgctaaatcatctgcagttaagtgataaagatcagccacattatgcactaaatctttagcaatcaattgtttaacgatctttggccccaaaccggcaatgttcatagctggtcgagaagcaaagtgcgtaataccctcctcaacttgagctggacaagatggattgatgcagcgcaaagctacttcatcttctaggtgaactaatttttgcccacaggatggacaagtcgttggaatctgataagctacagaatctgccggtcttttagccatgacgacttcagagatttctggaataatatcgcctgctttatgcagtttaacggtatcaccaatcctgacgcccttttcattcaaataatctgggttgtgcaatgaagccctagctacagttgtaccagctagttgcaccggatccatgaccgcagttggagtaactactccggtacggccgacagtccaaacgatatcccgcactacagtttcttgttcttcaggtggaaatttataagcaatttcccagcgaggcaccttaacagtgttaccgagctcttgttcaattcctagatcatcaatttttaacacaatgccatcaataccatatgttaggctgtttcgtttagctgtgtattcatcgataaaggcaaaaacttcatctaatgtttttaacttacgaccggtttcattggtatgaaagcctaaatcatgcattttttgaattgcttggtgctgactagtaatttcttcaggcggattaacccaagtataaataaaggtactaagttgacgcttcttggtaactttaggatcaagttgacgcaaagaacccgctgcagcattacgtggattagcaaaaactactagaccttgctcttctctttctgcattcaacttggcaaaggcttccttgcccatgtaacattcaccgcgcacttcagttgttaacggttcaggcaaagtctgtggaatatcactaatatacttagcattagctgttacatcttcaccaacataaccgttaccccgcgttgaggcacgaaccaacttaccattttcatattcaagcgatagtgataagccatcgatctttaattccacgttatattcaactggatgaccaactaatttttgcatccgttgatcaaaatccttcagttcagctttggaaaagacgtcccccattgacagcattggaatcgggtgctctaccttggtaaaatcactatcaatctgtcccccaactctttgggtaatggagtcgggtgtcacaatctctggaaattctttttctaattcaagcaagcggttgtagctttggtcgtaaacattgtcttcaacctcaggcgcgtccttagagtaataggcctcagcccattcattaagctgttttctaagtgaagccgcttcttttttagcttcatcaagagtaatttctgccatttttccctcctgatccaaatcaatctttctttaattatatcttcttaattggcgcaaaggcagccaaaagccgtttgattcctttaccagggaaagcaatatccagctccatatcttcaccagtgccattaactttagttacaacaccatgtccccaagctttatgctcgacttggtcgcctacattccagcccttcttttcagcaccgacagcgcctgaagctttcttagcagtataaacttcagcgcgagctcgttcggctttgcgagcaaatggtgccgtctgtttctcaaagctagattggataaagctgctttgtaatttttcattttcttctttgtgcagatcctgttcatcaatttcgtccaagaatcttgaaggcggattattttgcattctgccatacatcatccgtgagtaagcattagttaaaaacagttcttgcttagcccgagtaattcccacgtaagctaggcgccgctcttcttctaattcattgtcatccatcattgcacgttgcaacgggaaaagcccatcttccatgccaattaagaaaaccactgggaattctagtcccttagctgcatgtaaagtcattaaagctacttgattgtcatcttcatcaagatcatcttgatcgctaagtagagatacttcagccaagaagtcgcttaatggattagactcatcttcttcgggctcataatgatcatcaaaacgcttagtaactgacaagaattcatccaagttttctaaacgcgtttctgattcaattgtattttcagctcgcaaggcatcggtataatcaaaatcagctaagattttttcggttaaaccggttactgtaccattttgagcataagcaattgcatcacgtaatttagtaccaaaatcgcttaatttcttggctgctctagtattaattgaactttcagccacatgtcccatcgcatccaaaatgttgtagtgattctcatccgcaaatgttaacaacttatccacagtagcggcaccaattccccgctttggagtattaataattcggttcatactcatcgtatcagctggattagcaactaacttcaagtaagccatcacatctttaatttctttgcggtcatagaatttatgtccaccaacgatttgataaggaatattgcttttaacgaaagcttcttcgactgttctagactgagcattagtccgataaagaattgcgaaatctttgtaagcccgttttttatctttaacttcttcttggatctttgaaatgatgtagtgagcttcatcatcaccgctttgggcttgatagtaggttaccttttgcccatcaccttgatcagtccacaagttcttagccttccggttctggttatttttgatgaccgagttagctgcggacaaaatgtgaccagtagaccggtaattttgttctagcttcacagtcttaacatcatatttcttgtaatcctgctcaaaattcatgatgttttccatattagcaccgcgccagccatagattgactgatcggcatccccaactacacaaatattcttgtattgtgcagccaaagcatgacagagttcatattgagcctggttagtatcctgatactcgtcaactaaaagataacggaacttgttttgataatagtgcaaaacttcgctatcttttttaaacaaaactagggtctgcataatcaaatcatcaaagtccataatttgatcacggcgcaatctacgttgatattcttcatacaccttagccgccatcttctcaaatggtgacaatgcactctgcataaaagcttcaggatccagcaagtcattcttgccattagaaatcgcggctaaaataccgcgtggatcatacatcttaggattgatattcaagtctttttcaatatgcttaaccaaagttaattgctcggccgaatcagcaattgaaaaattatgaccataaccaatcttatctgcatcccgacgcaagatccgcacacacaaagcgtggaaagtcgacatccaaatgtcgttagctgctggtcccagcaacttttgttcacgctcacgcatttcactagccgccttattggtgaaggtaatggctaaaatattccaaggtgcaacatgattttcttcaactaaataggcaattcgtctcgttaaaacagaagtcttacctgaacccgcaccagcaacgactaataaaggtccttcagtggtttctaccgcttctttttgttgcggattcagaccagctaagatagatttttcgctcattattttccccttcactaaaaattatttcattaatgcaacttgaatattataccaaaaaagcagcgactaattcgctgctttagatttacttatcatatttttcaagatcaaactgttcaatcaaattaatcagcttatcggcatagtccggatcagtcgcatagccgtcggtaaccaaggctttagcttgtgtcttataatctttggatgctagaacatgcttatactgatcgtggttccacgttgtcccattctggaataatctagcgtgagcccgaatagaagcctcatatgagtcatatatttggaaacgcgccttcacggtaacccacttattctttacatattccttagttgtcatcactgccgaagtgttcgggttggatcctttaacaccaaaaagattgttgtatttttgcgacaaatcactttgtccataattactttctaggcaggcttgagcaatcgtgatgcttggcaataagtcatacgacttgtccacttcgcgcgcaatcggaccaatttttttgataaagtcttttttctgttttaatagttttgctgcttcctgttctttttgcagctgtgcttgttgaatctgctctgattgaatcgcgtaacgcctataatatctaaagccgacaaaagcaaccatcagaataaatagaattacgaatacacgcacaacggttttgacactttttggtactcttgatttacgttttcttgccatagttttattccctttaattactaattaaagtataaccgatttttgagtaaaaaaaaagaagtcgctcactgcgactcctcaatcagtgcgggcgagaagactcgaacttccacgatctaaagcgatcacaagatccttagtcttgcgcgtctgccattccgccacgcccgcggcacatcaactataatagcctaaatacagttgagatgcaagaaaaaatataaattattttaaatttctgatcattttacgcaaaagtttgcgctaaacgcaggtgtcccctacatttaccacaacgatacttttgtgtattaatcctgcgcattcttgggtatctcaacccacagttttcacaaagatataggtaacgatattttttctttttacgtaagccaatatcaggtgcataacgactgcctccaacttttttcagcaagattttaaaattgcgatcacggtgtcggtaacccaagcccaataaatgcaaatgatagtgggttaattcatgcttaatgattcctactagataatcatgatattgtggtactaaaaaatgcgcgttgatttcaagatggtgatcatccaaatgataacgcccacctgttgtggtcattcgccgattaatttttacaaggtgcttaaaagggcgatcaaaatattttaacgaaattttttcaactaaattttgtaattcattctcattcatggataaaattttattccaaaaataaaaatcagcaagaatttaatctcgctgattttttgctacctaaatatcttggcatacatccccgcctgcttaggcgtactaatgtgtcgtttcaagaaagttactaagtcatgtttgaatgactttttaccatccatccaggttccagtgaataagtgaatcgatttggagtccttagaaggattacacagaactccatctgaatagacatgaatgccatcttttaacacttgctcctgattacctagctttaagccatacttatttaccagcatttcagtaacggaaatactatttactcccgccatctgattcttggtgtcatattcaaaatcacgatcttgataataatccaaaatatcctgcataaatgggtggcctttttctgcaccaaaaattgcagctgacagataatcatggttttcaaaaccaataaaggcagaagcattcaaaagactatctaacttatccacgactctaacatcagtatctaaatatatcccaccttgttcataaatagcccgtgctcgaacatagtctgacacgaaggcccatttttttgcagcataagcttgttcaatataacgattctcatgcatatcaaaattatcttcattccactcaataatttgataatcaggcaattttttcttccaggttgcaatacattcttcaattatcggggatttaggattgtgtcctacccaaacataatgaatttttttaggaatcatttttaacctcgcttcaaaaagttcttaattagcttcacaatatcatcattaaaatcaagcttgaacaagaacatcaatgtcagataaataattaacatgacaattgacttaaaagccatatcgaaaaaggcagatggaattatattaggcataaacattccaatagccaaggttagcaccgcaattaacaaatacttgggcacgtcatggaaaacataactaaattcatagccatcacgtacaacccagagccgcaaaattaaaactactgcttcagtaattaatattgcaatcatagccccacctgcgccatatggcctatctaagagataactcaagacaatttctaaaattgccccaataactactggcacagcataatccttgtctcgctggttagccaaagcaaattggttagcaaataccccgccagtcggaatcatgataattgttaaggtaaaccaaaacattaatggagtcatcggaacatatttattcccaaagaaaaatggtacaaactgtttggtatttgccataataattacggcgaacaaggtacccagcattacagtagcttccagtgattttttcatcactatcttttgtgccttttttccttcgctcgccatcttaggcataatgactagcgaaatactggtaattacacccagaatcatatttgaaattcgttgtgaattgtcataaaaagaaacctgagtcgaattagaaaaccaacccaaaattggtttatccagcgaagtataaatttgagtcgcaatctgtggaatcatcaaagtaccaattgcaattgccgtctgtttaaatttgtaaaaatgagcaatgggttttcctacatagcgccaaatatcaaaccaaaagacaaaggaacctagcattgtcgacactgacatgatcaataaatatttccacaagtcagcgggtgattttacccataataaaattagaaccacactaactaactttaccgccgtgtttttcaaaacaacacgaccaaagtcagctagtccttgaaagaaccatgaaatatcaacctgtgctgagatcaagtatggcaccatcaacaagatataaaaccaatattgaacgtgaaatacagtcgctacaaaaaccgtgactaaaatggtgataataccggcgattccttggaaataccataacccccagaaagcattggttagctcctgcggtgtaccataagtgcgcgtccgtgaaattgttcgcatccctacatacgacacagacagaatacaaaaaatcatcaagaattgcaccgtattgttcacactgctataaatcccataagtcttaggacctaagacacgcgataaatacggtacagtaatcagtggcaccaatacaataaaaatctgataaaccgcattatataagatgtttaaaaatgttttacgcattttaacctcgatattcctgcgtcatgtacttaaagacgttctcacaatatgaatcaccatgcacctggttagtcaaatgtagccagtaaagacggcgattagcaatctgctggttatcaagttgatccagattgcgaattagttcatcctctgaattaacacagattccgggagtaatctcagcatatggtcccattagtaatccgcgcgttttttcatattgctctaaaaagttagtcacaaacacaatcggtttgttcaagtgcaagtaatcaaagtagattgacgaaaagtctgtcatcaagaaatcagtatcaccgagcaattcgtacaaatcataattgtggtcaaacaagtaatcattgttcatgaaagcaatgttagaataactgctcttgaaattggcaaataaacgcatttcatagggatgcaattttacaatcagatattgatgccgcttctttaattctgtatttaatttttcaacatcaaaatcccgaaaggcaaaaaagtttctctctttgattttctccataatggatttatcttccaattcataacgaaaagttggcatatagatcccgatctgtgcctgatcgtcctcagttttaaataagtcagccaacaattgtttcttcgaaattaccggcttagccaataaatccaaacgcggaaagcccagcttgcggtatttttttgtctcaattgccatacaagcactcattagtgattcatatagatcagagctagaagcaacaatatccgcattcttgtgccacaatttttcgttacggcgattgtcgcgtcgcttagtattattagccataattcccatgcgcttgagtggaacgccatgccacaactggacattaatttgatgcttgcgcaccttaaatggttggtgcgttgtaattacatatcgcgctgctccgattttctgccaggttttccacttcaagtgtgacgatggccacggctcaactaatgtaacgttatattcaggatgattcaattgcagccacttgtaaaaagcatagccgttagatccagacctacctgaaccattcaggataaccacattattgttttccatcgtggtaaatctagccaaaaaactcatccaagccaaataaagacggaataaaaagcttttcattaaaatacttccttaaaatagtctaatacctaaagcatataaaaaaagcttgagcaaactcaagcttttttctttatttttgttaaactttattctttacccatttttctctggcagaatttaacaatttcaacaatcaaaaccatcaaaattccggcaattaaaatgactaaccactgtggtccatcaagttcagtcacatcaaagaacttagtcataaatggcaattctaccgctgccataattacagcagcaatgataattgcaccattgaaccacttgttagaaaaagtatgcggtctaaaaatcgactgatgtacatacttggaattaattgcatggaacagctgaatcaagcccaaagtcaagaaggccattgtcaatgcatccccatgttgcaacgatggatcacccacatgtggaccgacatgcaaaccaatttggtatgcacctaaaactaaaattccttccaaaattccttggtaaataattgaactggcaacaccaccgctaaagaagttagacttcttaccacgcggcttgcgcttcataattccaacttccactggttcaacacctaaagcaatagctggcaaagtatccgttaccaagttgatccacaagagctgcacaggagctaagatatcccaacctagcattgtcatcatgaaaactgttaatacttcacccacgttacaactcattaaatatagaatggccttttggatattactgaagaccttgcgtccttgctttactgcttcaacgatcgtggcaaagttatcatcagccaaaaccatatcgctggctcctttagaaacttcggtcccagtaattcccatgccgattccgatatcagcttgcttcaaacttggagcatcgtttaccccatcaccagtcattgcaacaatcttgtcattagcctgccaagccttgacaattctaaccttgtgctctggtgaaacacgagcgtaaacgctgtagtcaccaacatgctgtttgaaatattcatcatctagtttatcaagttcagccccagttaaaacgcggctatcctgacctttttcaataatacctaggcgttccgcaattgcttgagcagttgtttggtgatcaccagtaatcattactgttctaataccagcactctttgcttcagccacggccgctttagcttcaccacgttctggatcaatcattccgactaacccagcaaaaattaaatcttgttcaacattatcagttgttggatcggtgtacaattggtcgactttcttataagcaagccctaagacacgtaaagcttgttgcgccatctgcttgttttgcgctaaaatattttgcttctgcttatctgtgatcggctctacttgaccaccattttcaatcctagttactcgctgtaacaacatatctggtgcgcctttgaccgctacaaagtattgctcgccatctttattaacagtactcatcaatttccgttctgaatcaaaaggcacttcttgaatccgtttgtatttttcaagcaagtcagttacatcaatgttttgatcaaaagcaaattgaatcagggcggtctctgttgggtcacccaataagtctccgccattttcaatcttagtatcattagccaaagtcattgccaataaagctgggttattttcgctaatactttcactattatcatgtaactttttatcatagaagaccttttcaactgtcatccggttctgggtcaacgtaccagtcttatcagaacaaataatgtctgtagcacccaatgtctcaacagcaggcaatttacggacaatcgccttatgtttggccatcgtttgcgtacctagtgccaaaataatcgttacaattgctggcaagccttccggaattgcagctacagccaaggaaacggcaaccaagaacatgttaatcattaaagtagagttacgctctgctgaatcagccttgagcactcctacgataaagacaataacgcagattgccaaaatcatgatggttagggtctttcccagttgattcaagtttcgctttaacggtgtatcagtttcatcagcattgttcaacattgtagcgattttaccaacttcggtgtgcattcccgtactagttacgattccttcaccacgaccataggtcacattagtattggaataagccatatttacgcggtcagctaaagcaatgtcttcaccttctaaagtttctgcatgcttttcaactggaactgattcaccggttaacgctgattcctcaatcttcaagctgtgggcttgattcaagcgtaagtcagcaggaaccacatccccagcttctagtaaaactacatctccaggaaccaattctgtgcttggaatagtaacgattgtatcatcacggcgcacatgcgcatccggcgtagccatttccttcaaagcatcaatcgcagcttcggaacgtgcttcttgaaagacacctaaaattgcgttcaaaatgaccacaatcataataattgcggcatcagtccactcatgagctaataccccagacaaaatcgcggcaatgatcaaaacaataatcataaagtctttgaattgatcaataaaacgcatgaacatgctttgctttttcttggaagctaaggctttcggaccatattgctctaatctagctttggcatcactagcacttaacccatccttaacggacgtgttaagatctttttcaatgtcggggatcgactcgacataatattttttcgccattttccctctgctatataaaacatagaaacatgcagaagtttgatattttccacataccagaaaaaaatatatttttcctttcctaattttatttactgtcgtcatcattggtattccgatattccatctggggagtaatcgcattgaccaactcctgcagcttaagggcttagccagccccattattttttattttgttaatgccaataaatttaatactgcattgtcatcacgatcattgctatagccacactcataacaaacatattcattgtgcttggtgccatgttttctattgccctgcaaagtgattttgtctgcaccatttttgacatagccgcaactggcacatctttgcgttgacgggtagcttctatcagccaaaattagctctttatcataccaagcacatttataggataatatctgtctaaatttgccaaacaaggacctctgtatgcctttggaagccacatgcgtcatcatcatttgcttgacattcaagtcttcaatgacgatttggtcataattatttgccagctcagtagtaaatttttgcaaaagatcattctgaatattgacagccctgcgataatcacgctgaagcttggttctcacttgcacgtaattattgcttcggccagccaattttccattaacccttcttttcttggccaatattctctgataatgcttgatccgcttgtacagtttctgcagtcttgccggcaaaatattgattctgccctcagtatagctgaagtgcccaacgttgacatcgatggcggtctttttgccagttttaacctttattccagctttttcttcgtaggaaagagcagcgtaataatggcctctttctctaaagatgctggcaattttaacctgtttcatcctcaatgcttcatatgttggaatatcaaaccatgatttaattcctctgggcttatccagtctgagcttgccattaataactttagctcggtcagtcttaaaaccttgacgtggagctttctttgacttgaaatgcggcttgccccagtcgagctgggctttgtcaaaaaagctcttccaagcgttggccaagtccttgactgccaactgcagacaacgagcagacaaggtaaactgccaatcagccttgttattgactaattcatctcgcacccgacactcattaggactaggattattatccttatttaaagtccgtgcttcatacatatcttgccaggtttctaaggctagattccagcagtatctgcggtaatcgcatagacggtcaagttctctttgcatggtcttgtttggttttagctcagctacctgtgttttaatcatttatttcacctccaatgcaaacataagtttagcaaaggatgaaacaaaaacaagcgaacaaaatattaaatttttagcagcagctaatttgtttctatgttttatcttcctgatcaaattaactgcatctttttctatttattgctatcaaatcctatcttttagtcaatcattatttcctcctcaaaaataaaaaagagacttacatgcttgtagcacataagtctcacgaattaagataaatccagaagtatcttacttcggctgttggattcatcgcaagcaattgctgttactcccttatgacaagttaattataagcaaaattttagctatctacaagttttagcgaattgcttttactttttataaaagtcatcaaagacagtaactggcaaatgacgcttgtgtttactcttattccataatttttcaatttgatcagctgttttatctgatacttccttaccttcaaggtaatcatcaatctcttggtaagttacaccgagggcaacttcatctggcaaatctggcttttcttcttcaaggtctgcggttggagccttttcatataaatgcttaggacaacctaattccttaagcaaagccttgccttgacgcttgtccaaacggaacaatggcgtcaaatcagcggcaccatcaccaaacttagtgtaaaagccactaaagttttctgcagcatggtcggtaccaacaacggcacccttattagcaccagcgatggcatattgaactaccattctttgccgcgccttaatattgcctttgttaaagtcagtaatcttttgaccagttgcttctacaaccttcaccatagcatcaactggttccttaatattaacaattaaatcctgatctggcttttgaaaagcgactgcatctgcagcatcttgggcatctgcttgaacgccataaggcaaacgaacagcgataaattgataagaatcatcgccagtttcctcacgcatttcttcaattgccatttgacacaatttaccagtcaaagtggaatcttgaccaccagaaatacctaagacgtatgacttaagaaatggattagcctttaaataatctttcaaaaaatcaattgaacgtctaatttcttttttagggtcaatttctggtaaaacatgttcataagcgataatttctttttgtaattctctcatcgaccaatgcttctttctctaattttacgccgaatgtcttgaatcaaatccatcttggattcgtataagttttgtgataaatccactggatattcctgcggattcaggctacgcttatattcatcccataaaccatcaaggttgtcagcacagaattttttaatttcatcaagactaggttgatcataaactaattttccatctttaaaaatatcatgtaaaagtggaatagcagtgtaatcagttaccaccttattaatatagttatattgtgggtggaacatgaagagcgcgtcaaatttgcgtggatcttcattataccgagatacccagtcaccttcatttttcttagcagtgtttgcgctaatccgccatacttgttttttacctggggtggaaactttgatggcatttgaagaaatcttcaatgtatcccgcatggcgcctaattcatcttccatggcaaccaacttgtaaacagcaccaagggctggttgatcataagcagtgatatacttggtcccaatgccccagacatcaattttagcgccttgcatctttaagttagtaatggtgttttcatcaaggtcatttgaagcaaaaatcttggcatctggatagccagcatcgtctaactccttacgaacttgcttagaaatgtaagccatgtccccagagtcaattcgtacgcccaagaagttaatcttgtcgcccatttcattagccaccttgatagcattaggcacaccactacggacagtatcgtaagtgtcaaccaaaaaaacacaattcttatgtgtttccgcatatgccttaaatgcgtcatattcactgccaaatgcttcaactaaagcatgagcatgagtccctgaaataggaataccaaacaatttaccagcacgaacattactagttgaatcaaagccgccaatataagcagctcgagcaccccaaatggccgcatcggtttcttgcgcacgacgagagccaaactccattagaccatcatctttaacagctaacttgattctagcagctttagttgccaataaagtttggaagttaataatatttaaaatagcagtttcaactaactgacactgggcaagtggaccttcaacttgcaaaattggctcgttagcaaaaaccagctcgccttccttcattgaacgaatagtgagctttaattttagattgcgtaaataatcaataaagtcatcatcgtaaccttcattttctttcaaatattgcaggtcactttcggtaaactttaaattctttaaatagttaatgatgtgttccaaaccagcataaacagcataaccgttgccgaatggttccctgcggtaaaaactttcaaaaacggcattgcgatcagcaatccctttcttgaaataggtatacatcatattaatttcgtataaatcagtgtgtaaagccaacgaatcgtctttggctaattctggataaaacattgcttctctttctgtcattaaaaattaacaatttcgtttttcattatacagccattacagtccattggctattctcaaaactatttttacctcaaaattagatacactttttcaattgagtccagttgatttttaatagaaaaatgctcttccgcataccgcttttctgtattagccatctggcgtaactcttcatgggttttattaacggccagattaatctctttagcaattgaatcaatgtctcccgttttagcaatgaaaccatattcgggtcctggaatcattttatgaatatcacctacatctgtggacaaaatagggattaaattgtctgttgcctctaaaagcacaagtggaaaactctctgaatatgaagttaagacggctagatcaattcgcttatataatccgctcaattggtgttgagtcataaaaccgtgaaaagttacttgtggtgccatgtccaattgccgcgtcaaggccttcaatgcttcaagctgactaccatcacccgcgatatgcagacgaatatgctgatcatctaattttttcacagcttttaagagcaattcttgtcctttaaccttttccgtacgagcaacgttaataatattaaaataggtatgttcatatttagctggaatttcactatcactgtggaaaaagatgccattatagatgacatgtaccttgtttttatccacatgtgcgcgattaattagtagcttggcaaaacgctgagttactacgaaaatacaatcagcttttctcaacgcacgtaaattaagtttagtaaaaatattgccaatgattcccctaccttcaaagtctagataaggatctgaatgtacagtaatacaccaagttgcacgaattcgcttgtgaatcaaagataaaaataagttggcacgcgcaccatgagtatgcacaatatcatagtgcccctcattgataaacttagtcagtctacctaaactgcctaagtcataacgactattagctcctagcacatgtgtagtaatcccagccgctcttgctgcttgtgctactggtccttctgccagcgttaataattcaaaatctttgccttcatttttggcttcagttagcaaattaacaatatgtgataaaccgccgccattttctaaaccagcatttacatgcaaaaccttcatcttagtaaaattattttcccttcttttttgactgtttaactcgcacaacaaactgtggcaaaactaacatccgcttaaatctgctaggattagtaatcaagcgataaaaccactctaaatgcgtcttttgaaaagcttctggtgctcttttaacgatacctgaaaagacatcaaaactgccacccacacccatcatcaaagctggtgtttcgttcttacgtaagattgataatagtttttcttgcttaggaaaacctaatgctgcaaaaaccatatcgggttgtgccttctgaatgcgccgtgccactagttccaaatcttcagtaaagtagccgtcttctgcaccaactagattaatatttgagtattccttagcaattttgctttgtactgcatgaattacttgtggcttagctccaattaagtaaactcggctaccacgatcgctagcaacatccatcagccaagtaaacaaatcatatccagtcacccgctcaggtaacggctgcttaagcattttagctgcttttacaatgccaatcccgtcagcagtaatataatcgggatcattttttagaattttcataaattcaggattctcgtttgccgccatcacaatctccggattagcggtcacaataaaggtcgacaggtgattatttagtcgattaataaattcattttggaattggttaaaagttttattatcaaaatcaacacctaaaatattaactttgctcattttcacacctcatgcgttttcttatctagtttctattctaccattccgacacgcaagtacgagaaacatgttcaagttttatattttattcaaacatgataagattgttttaataaaggagaaaaaatgaaaagagttattacctatggcacctttgacctacttcactacggtcacgtgcgactgcttaaaagagctaaagaattgggcgactatttaatagtaggtttatctaccgatgaatttaatgaattcaaaaaacacaaggaagcctacaatacctaccctgaacgtaaatacattttggaagctatccgttatgtcgaccaagtcatccccgaaaaggattgggatcaaaaaatcaccgatgtacaaaaataccatatcgacacttttgtcatgggcgatgattggaaaggaaaattcgacttccttaagccttattgtgatgtggtttacctgccaagaacgccaggaatttccactactaaaattaaagaagatcttaaataaaaaaatactccaattccattcaatttgaatgagattggagtttttgtttacttagaaaaagtgaattcaaatcgttctgcaacgtaacgtgcgcgggtgtattcgaatggttgcccatctgctagttcagttacctgtcgtctagtaattaacggttcaccttttttagctttaagaagacgcgcatcttgctcgttggcaattgatgcagaaatatgttccgtcactcgtccaatggcaaaaccaccgcgcttttctaaggttttatataagtgcgttgaaacatcttctttagaaaaattctttactaagtagtatggcaccgttacgacttcataacaaattggtgtcttatcagcgtagcgaatccgctccatccgcaaaacgttctcattatcttttagcgcaagacgctctttttcagataaagatggattgccaatctgataagaaattaacttacttgaaggaacttgaccattagccttagtaatctcagtaaaggacataattcctgacattttttcttgaaccttttgactagctacataggttccgctacccaagcgccgttctaaaattccttcatcttctaatgttttaatcgcttggcgtaaagtcattctcgaaacgccaaacttaactgccaattgacgttctgctggaatacgatcccctacttgataaacgtgattctcaatatcacgcttaatctgattgtgaatcttgatatacatcggttcttccatagtcgccacccccaaagtttagtactgctattattataatctaaattggtctagcttgcattaataacactgcttcaattttacagactattttttcttagcggtccacttcactccaagaatataaacatttggacgcttgttatattccacttcaacttgttcattatcattagcaactacactggcactaaattttgcttcatctttaacagctaagttagcctgattaggattcagcacaatattgtggcccttcatattagcttcaccgctcaaagctaaaaagtactcatagttcatatttccagtgaaggtaacacgtgtagcatcacatttcgcctgatcttgaaaatctgcatgagctaaaattacggcattgttcattgtaacttttgcttcatcaactactatcattcgattgatggttgaattttgaatgattgtccgtgtctttttatcaatataaaccccacccaaaaaagtagaattcataatattgctccagcagtcatcacttaaataaaagcaggaatcgctagcagacttaacttttgaattaagcatattcatccaagtttgcccatgcagtaatacataatctacttccgaattattaagatccaactccgcattcgttttggcaaaagtattaatactgccgtgaatctttgaattatttacaattgctgttccttcgccttcaattgccaaagcacaatatttgtccgagaaataatcaatttctgaatcattcatttccaaacggaaattggcatggtcatacatggaaactgaaccgttaacaattttggttgaataaagttccaacgtgatcttaccattaaccgcgatagctgctgtatcagttcccgtgcccttaataaagcaattacgcaaagttaaatagccatcaacgcctactggtacagataggctattatgttcggtagttgtatcaatgcataaattttctaaagttacataacgactatcttctgaaacactaatatagccataaatagtcgtgtcttctggcaaagagcctgttcccttaattgtgatatctgttagtgtgatgccctgcggcaaataataatatccggggcccagcatcaacacatcatcggcacgcaaatcctttaaaacctcgtgccaactgactgaactgctagatccccctactctaattatcctagccatccattatcctttcatctcgtaaaaaccgattactattgtactaattttctttaatttatgttgtatttttgctcatcaaaaaagctaggttcgattcctagcttcttatactatttcattttaacattccagtaataagccacattaccataaggagaaagttggaaacctttcactctcttattcaataagtatgacgtaccttgttggaatagtggtgccgcaaaggcatccttttgaattaattgtttttcagcgttaactaaggcattcaatctcttctgcggatcagtggcataagttgaacgagccaagtcaatttgcttccagaaattggcgttgtgataatctggcgctaaattaaacaaaccaccaactgtcaagaaatcaattggatcttcataacttggctaccaagttccgtaaacaaagtcgtaattgtgattagttgtgttagatagccgtgacttcaaaggaattgaccgtacccgtagagttagaccaggtaaatttttcatcaaattgctttgaataaattcacccacacgcttagcatcgtcaatatctgaagtaagcaattctaaggttagcttcttcttacccaattgcttcaaaccaagttgccattcctttttagcttccttggcattataggtaaccaagtcgccagcatccttgcggtaatcgttgccagttgcctgatcggtaataaagtttgcggcaacaattccatttgacaccttgccttgatgcaaaactgtcttgactaactgttgcttattaattgcccggctaatggcccgacgaatatgaacattgcctgtactcttacgcttcaagttgaaagaaagataaccattagttggcgtaactttggtatgatagctagaattattttgatactgcttaacaaaatcagaagtcaatgtcgtgtaatcaagttcaccacttctgaacaagttaaccccagttgaaggagtttgaaccacttgtacgttaactttattcaaatcaacaattttcttgttccagtaagttggatttttcttgtaagtccacttcaaatttgaacctgtccaaccagatacggtaaatggaccattgtaaactagattcttactgctagtcccatacttagagcctaactttttaaccaatttagaattctgaggatagaattgtgcaccctctaagatttgtggcaaatatggaattggattagctaatgtaacttgcaccttatacttgccgagtgctttgattcccaatgaatttaccggtgctttaccttgagaaattgcctcaccgtttttgataatggcataagaatcggcatctaaagatgaattttttgggtcaacggttctgcgccaagccgttacataatccagggcagtaactggatcaccgttagaccacttagcattattgcgtaaggtaaaagtatagaccttctggtctttagaacgttcaacttttgtcgcaccagctaattctggctgatttttcttattaaaacggtaaagaccttccatggaattctgcaaaacttctgaactagtcgtatctccatacttgctcgaatctaaagttgaaatttcatttgtgacagaggtattcattgtcttagtcggtgcagcattactgtcattgttagagcaagctgccagcaccaatgcggcagctgctgtcatcactcctgaaaaaatccattttttacgtctcaatcttctcaccctttacttactttttgtttaatacttacattttacaagtatatctaatacggaagaaatttcaaatactttttccgtataatagctataatcaatacgtatacaaaaatggcaaaaaaaaagaaacgtcacataggacgtttcttttttcgggttgggtgttcttttagaactattgggttagctggattcgaaccagcgcatgatggtaccaaaaaccattgccttaccacttggctataacccaataccagctgaactttttacttgtcgttcaacaatggaggagggtggattcgaaccgccgaactcagagagagcggttttacagaccgccgcgtttagccacttcgctactcctccgttagctgacttaattataataacgaaaatccaaatcaaatgcaagacttttttgaaacttttttcaaaaaaaagaagaagccatgacgacctcttctcaaaatttaaaaattgatttatatctaaacagttaattttaagcctaatgccttttgtgctacttgatttaccagactccattgcttgtcataagttggtgaaaagaagaaatctgcttctgctaaatcttccagtgtcaacttatttctaatagctaagctcaaaacattggcttggccactaatgtcatatgatgaaagtacgctaccgcctaagatttggtggctgtcttcattataaacaacagcaatatagcaagtaggattatctttttcaggaatatagtctggacgaagataactctttaagactgtttcttttgcattaattcctgctcgcttggcattcttttcactgagtcctgttgttactgcatgtaaatcaaaggcttcaagcaattgtgcaccaactaagcccttaaagacacgttctggcttgtcttcaaataagtgctcaacaacatattgagcctcatgccgtgcagcaatggcagatggcatcggtactcttctgttagctggaatgctaaatgggaagattgcatccccaattgcatagacatcctttacattggttctaaagtaattgtctaccttaatgtagccattgtcataaagatcgatcgtgtttttcaaccaatcagtatttggcttaataccaactgtaataatgacacaatcagcagtaatatcacccttatcagtctgaactgcattgacctttccattgccaacaaagccagtaactttagtgttcatagccaggttaacaccatgatcagtcaattctttttcaaataagctagtataagtatcattcaaataattttctagtggtttttgcccaccgtcaattaaagtaacattcttgcctgctttagcgaaaacctcggcagctgcaattccgttaccagcaccaataactgcaacatttttaatagcttcatcttgagcagctgcattgatctctgtagcgcaatcatagcctctcatcaacataatatttttcaggtctgctccaggaagaggcaaacttgcggggttaacacctgaagaaataattagcttatcataactaacttctttggttgtaccatcttttacgtttttgacagtaaccgtctttttagctggatcaagagctgttactgctgtgttattaacaactttaccaccccgttcaactagatcttcaggagtaaagtttctaacgttgtcttggcctgtagtttttccttcaaggaatagcttcattccgcaagacataaaggaaacgaagtcgcctgcttcataaatcgtaacgtctacatcatcataacgatctaaaatttcataagctgcctcttggccgccgtgggatgcacctacaataatgattttcttttttgacatagcctgacctcctaataatgcagcaataattgtcgtttttaagtaatagcagttattgtaactggttacattatttatcttttaataagatatttcaattaatttgcttttgattagtgcgaagcagcaatatattttttatataaaaaagagcactactgatagtagtactctagagggaaattttccaaaattatcttatttagctaattctgctgatagatttcgttcactaatttagtgatttcattacgattaagaacttcatcatacatatccattgtttcctggattgtattttctaaattagtaccatgatttttggcatagccaataaacttttttgcatctactattttagcttctttaatcgctttttctgcagctcttttagcaacttcattcatctcatattctggcttattcatgtcttcgacccattttccgctattcacgtagtagtcgatatccttctgcaggctgatatccctgcgtagtacatcatccgtttttctagatcatttttacgtgttgtttgcatctcaatatcatacactcgactttgatcatcttgtgcccagatatctaagcgaatgtttttggattctagtccaatgttgccgtcatactgggtaatgacattaacttttgtcaattttaattcaggaaacatccgacgtagcagttccagacaattctttttattgctcataacatgaccgaataccaagtcgttagtaattcgaggatatcgattaattcttctcctcatattttacctcttttctttttcttaagtaggaaaattaccctccactatttattactcaaaaaagtgcaaatttttcagaaatttaaaaatttagacacgaaaaaagccgatgcaaatgcatcgactctttcagttaaattattctactttttaatagaagtttacagccttgatgtaacgcttgttgttgtttctgcagccttcaattctgtagtacttcttaccgttcttaaatctcatttgaccaccgtaagtagttacagtttgacctctgtacatcttaccagtacctggagtacgacggtatgatgaccaataaatgtaggcattgtgcttaaaagtacgttggttaccagtaatgttggttacacgaacgtattcgtccttgttagccaccttgtagtaagtcttaccgttgatagttacaacagttggaacgatttcaatgtcgttgtaagcgtagtacatgtgacctaagtagttaccgttcttgtcataagctcttgaatcaaccattactggcaaagtcttggtgttagtgtcaccagctggcttaacaagtgatgaagtcttaacccaaatgttgcttgagttagcatctgacttagacttagttgaaacttgtgagtatgatacattgttaagggttctagtttgatcagcaacgtaaacagtgtcaccatctttgaaagtagttgaagctggtcttacattaatgccataaatgtggtaagttgcgattgagcttgcgccattagcatatagagcttgtttgtggcttgaagtaattaaaacagtgtatgttgcagtagtcttcttaccagttaaaccagtagcagttaaagttacattatagtaacgtcctgcttctgaagtattaacaggatttgaagttgcttctagtgaagcagctgtattattattgctgttttgtacagctgaaataataactggctcaccattactatttacaaaattagttggattaaattgtgaaccaacagctacttggaatatttgaccattaacactccccttgctttgaccattcaatgaccaattgatcactggattttgagtagtatctgtagttgaacttgaacctgaaactacaactgggatttgaacagtagctgtttgcgtagaagtagaacctgtaccagttaaagtaagattgaaatcactagttggtaccgcagtaatattcttgttatctttacacctgcattcttaagaatagcagcaacttcactatctttaaggttaactttttctccactggcattattcgtactaaagaaaactaatcctaaatcattaattgccttagtaacactagctacagtatctttagccttaatagaaatagtagttggtacaacattagctgttttatcggtagtacttgcagcatcaattacttgattgccatatgtaaagtatgatctatctgttggctttgctgttgttgctgtagtagtacttgtagtaccagtagtgttagttactgtacctaaactaatagcagcgttaactggaacagctgaagctgctacaggagcaactgccaacaaagcggcagcagccatacttacaattcttgtattctttctcataattatgtggcctttcctttctgaaacagaaattcatcctaagcagtaagttatatcttcttctgcttgtgaaataattatagcatgttacgaacccgattactaaaaacaggatcgactcgtgtgtgtgattttaagaatacctcctaaaatcaccagtaataccctaccctttatttgttaaactgtagttaccggacttttacaattaagattcaaaacattacatttttgtgaagttttaaacaagttattgatttatgacagaacttatgtgtgttaagaaaaggtaattttaacacttgttcgcttaaaaaaattaaagctcttagattttttgattagaaataattgcttcatgttctttaatatgctcaactcgccctgcatcccccgcaataagtaacaaatataatgcctcaatcattgtcatacttgccacgcgtgagaaataatactgcgattgcatcaccgtctgccgcactgctgtctttaaatgcacatcagctaatagcgcaatcggtgaatcatcgcgattggtgatcgcaatcaccggcatccctttttgtttggctaccttaatttgcttaatgattcccgctgcttcacctgaattcgaaatcaccaacaagcaatcctttttactcaggttcattgtctgcgcaattgccgtttcaatcgtgccacctgaatcaattgccaacaagccaatctgattaaacttatacactgcatcagcggccaccggataagtatcgccctccgcactaacctgcacaattctgctttcagtcaaaaaatgcagcacctgatctaatttggcttcagtcacattctccaaagtcgccttaatctcggcgactttatttttttcaatcaattccaaattagcactagcatcatcacgtgacatattttgaagtgacacactttcagttgcattctgagctagttgaatttttaaatcatgaaaacctgtcaaatctaaattatgacaaaaacgcgtcaccgaagcatcactcacctcagcttcagttgctaattttgaaattgtataatttaccacctgttcgggctgttttaagatcacttgagcaatcttctgatcactggctgacattgtcgctaatttactatagattgtatcgataattttagtcattattctcaccttttctgtgccaaaattatatcatcaatgtaattaattttcacaattttatttttaaagaaaataaatttatattttgattgacgaaaatcatttaccaaggtagtatgtatttgtaaataattttcacaggagaaaataaaatgaaaattaattcgataagtgacctcgctttaagtaaaatcaagccgaaaatgactatttctcttggcggcggaagcaatgtatttaagttatctcaagcgattgcacagcataacttagacatcacattatattctccatccgaacttactcgctttaggtgcaaagaactcggattagagcttcttccatctactgcagcgactaagatcgatattgcttttgatggttgtgacagcattgataagaattttaacgttctaaaaagtttgggtggaattcatctttttgaaaaacaggcagcacaaattgccaaacagtttatcctactcttacccagtcaaaggatacaaccgattctgaatcctaaaattccactttgtcttgaagtggcaccgccttgtgttaatcaagtacagaagtatttaagcagtttacatttaactagtaagattcgacaagatagttcagtagctgcatttgcccgtacgcctttgggcaactacttaatcgatgtttttaacgaagattggcacaatatcactgaacttaatcgtcaactttgtttacaaaatggcgtagttagttcttcactatttgaaaacttaactacttcattaattactgaaaaagacggagaaattattgaacttaagagaggtaataatcatgaaaacatttaattggggaattattggtactggctggattgcacatgatatggctgatgctttgaacaaagtcaacggcgaaatttatgttgccgcaaatccaaatgaagaagcactccgtgcctttgtccaagaaaaacatgtacagcatgctttcactaatcctgatgaaatgattaaggatcctagcattgatatcatctatattgctaccccacacactttccactacgactacatcaaaaaggccctcaatgctggcaagcacgtcttttgcgaaaaggcaattaccgtcaatgcacagcaatttgatgaagtggctcaattagctaaagagaaacacctaatcttaatggaaggttttactctttatcacatgccaatctaccaaaagatgcaagatatgattaagaccggaaaatttggcgaaattaaaatgatccaaattaattttggctcactcaaggactatgatccgcagaatcgcttctttaataaggagctcgctggtggtgcattgctggatatcggcggctacgcaactgcttttgccattagtttcatggatgaatatcctgaaagtatcaataccacggtaaaattctttgaaactggtgttgacgaagaaagcggcattattttaaaaaattcgaaaggccaaatggcagtgatgtcattatcgatgcgggccaagcagcctaagcgcggactggtttcgggcaccaaaggttatttcgaaatcaatcaatatcctcgcggcactgaagctgatattacttacacccagagtgctcatgaggaaagctatgataaggttactgccggggatgctgatcaggcgcttgaatatgaagtcactgattttcaaaagtatattgaacaaggccatgacgaaggcgaattggaaaaatcgcggatgatcgctcacattttaaccagcattagaactgcctggggcatgacttatccatttgataacgaggaataattagttggatttcaaaagggatcgatacataacatcggtcccttttatttgcacttattgcttattttctgcgacatatttttctagtcgtttcaagccttctttgatctgatccatcgacgttgcgtaagacaaacgaatatatcctgctccacctttagcaaaaaatgagcccgcaattacagcaacatgcctcttttcagccaaatcataaataaacttggtatcatcttgttccaagcctgctggaattttggcaaaaatgtagaaggcacctttaggcttaacgcattcaaagcctaacttggttaatccttcataaagcacatcacgccgcttttggaattctttcttcattggttccgcatcgttcattccattgcctagtgcttcttcagctgcatcctgcattggcgttggttccgtcgttgtgattgcttggtgaatcttagccagttgatccaaaatcggcttaggcgcagctaccacaccgattctatagccagtcattgcccaagcttttgacacgccattcattaaaacaacttgatcatgtaaagtcttttccatcgaagcatgtggctgatcataattgagctcactataaatttcatcacaaagaacaaaaaccggcttatctcgaacaacatctgctaaggcatcaagttcatcttgtgaatacatcacacctgttggattggtaggataattcatgacaagcgccttaacgcgatcaccatacttgtccaatgctgcttgcaatttatccggcgttaatttgaagtcatcgtcagaagtgtcgatttgttcaaccgttgcacccatggatagggcatccccaatataaagcggaaaaattggtgttggcaccaaaacaacgtcgcctggattaagcgccgcagtcaaaaagtcgtagatcgactccgttaccccattggtgatcaaaatttcgcttgggtcgtatttttgtccatatttttcagctaaaaaatcggctgccgccttgcgcaaacctggagtcccgttagatggcgcatagtgtgaatggttattagcaatgctggcttcagccgcttttttaatatgctctggcgtgttaaagtcaggctcaccaatcgtgaatttgacgatgtccgaaatcttgttggtgtaagctgcaaaggccaaaatctgccctggcttttgttcaaccaagccttttttcatatgttttgttaagtcgaccatagtttttcctccttatatcgaactaaatcaattcaaatataggagtctttttaatctttgtcaaaggaaatattaattttgatatctaaagtgcacattaaatccaataattaacaaagcataaatactataaatagccgtaacagtcggatacattgcctgatactttatcagcaaaagaataattaaaactatcgccaaaacaatcgttaatattctaaaacgttgaaaatatgacaaaatcggtaaagccactgtcaaaactatatcagttattaagatagtaaaatccaccggatatgatttgatataaaaaaactgaaatattggcaatgcttctaacagtaagaagatataactaataatcccacatattaaaagcaactgattaagtatctttttatagtctttcattaaatcaagaacttctcttttttcatgtaccagtgcttaaccagagtggtcaatgcaatgtacaaggtcaaaagtacaagaactacgagaacataatattctgggatcggaccgaatttcattaccttagccaagcttggaatgtaaggcattgcagtaccgatcaatcctgcaccgatcgtagcgagcattactacgcctgaagagtgctgttgtaagaagggaattgctggatcacgcaatgcttggataaccatttcctgtgtccagagtgattcgatgaaccagccactccagaagatggccataaagacagccttttgccctggagtagcagccacataacttgtgcccacagtacttggacaaatccagaagtaaagcaaggcaaacgtaatgatatcaaagattgaagatgtcggaccaaagaagaacatgaacttaggcaacttctttgtctcccacttacgtggtacttccaagtatttttcaccaactctatcaaatggaagtgacaaacaagatgtcccgtagatcaagtctagaatcaacaattgcattggcagcattggcaagaatggcaagaatgatgatgccactaagattgacaaaatattaccaaagttagatgacaaggtaatcttgatatatttcatcgtgtttgcaaagatctgacgcccaattcttacaccatgttccaaagtacgtaaactcttgtgcagcaagataatgtccgcactcttttttgcaatatcaacagccgtatcaactgagattgctacatcggccttcttcatggctggcgtatcgttgataccgtctcccatgtaagcaaccgtgtgaccattttccttcaaaatctgaataattctagcctttgactctggtgaaagctttacaaagaggctacattcttcaaccatctttttaacttcatcgtcgctcttaccagcaaaatctttttcactataaatgtacttggtgttcaagcctactcttgaagcaacactcttagttacagcagcgttatcaccagtcaaaatcttaacggtaatatcgtcttgctttaacttcttaagcacgtccttaacatcatccttaggtggatcaaggaaggccaagaagccagttaagatcaaatctttttcatcgctaacattgaattcaccggcttgagcaggattgttcttgtaagctaacaaaacaactctcaaaccatctttgttcaaatcttcaatgtgctttaaaactttttctttgtaatcatcagttaaatcgttgatgtgactgccaacttgcacacgattgcagcaagcaagcatttcttcggcagcacccttagttaccaggatacgaccatcgccgtggcgcttgaccacgacactcatgcgacggcgcttgaagtcgaatggaatttcatcaaccttagtgtagtcgtgtttaatttcattaacatctagctcatcgctagcggcatcgatgatggcttggtccatcaaatcgtgcatccccgtttggaagtacgagttcaagtaagccaagcgcaaaacctgtggattttccttcatatccaagttgtagtgccgttccaatacaaccttgttttgggtcaaagtaccggttttatcagtacaaagcacgtcggcggcaccgaagttttggatggagttcatctttttaacgatggtgccgtgcttcgacatttctagcgaacccttaaccaaattactagtaacaataactggcaacatttctggagttaaaccaacggcagtagcgatggcaaacaacaaggcgttgagccagttacctttagttaaaccgttgatgaccaaaactaaaggtgcaatgatcgcggtcattgttaacaataatttagaaatgttcttgataccaacatcgaaattagtttccttaacgtcgttgtttgaaatatccttagccaaacgaccaaagacagtttgttcaccggtggctaaaacaacgccaacacctgaacctgacacaatagttgttccttgatagattacatcaggatagtccaaatattgatccatgtctttttgatcgggcctcttagtcgcaatcttttccacaggcgttgattcaccgttcaaagaacttgatgaacagaacaagtctttagttttgagcaatctaatatctgctggcaccatgtccccagcgtggatattaataatatcgccgacaactacttgcttggtagaaatttcttcatccttttgattgcgacgaatattggtagttacagacaccatatttaagagggcttcaactgcgtcattagttttcacattctggataaaggatgttaatccagaaataatgatcatcgcaatcataatgatcacagtactcaggtccttttgatctgccggcacgaagacgtagtcggtaaacagcgacaccgtcgctagcagcaacaggaccattgtaaaaggagtgaagaatgattcaatgaagaaatgcaatttcgtgttgtgcttcttggtagcaacttcgttaagaccattcttctccaaacgctctttagcttccgccgaagacagaccgtctagcgaactatgtagcgtctttaacgcttcttcgggagtttgcctagcgatctgcttaacaaactctgtatcggctgtcttcttattaatcagcaacttgttttttgccatgttaatcacactttctgattaaacacgcaaacaaactaaaaaggagccaataccaattagtattaactccttatctaagcgatgtttcctcgtcgttcagttttgacactacgtgacgtaagcacaggctagctatctggatctcgccttatctcgacaagaactattttactcgttggcatctctggatgtttccgggcgatagcttgtgttcacgtaggagcctcacctaacagtttatttgctttttcaattttcatttttattatatgcatattatttgacaatgcaattatctttactaaatcgttagaaattgtaaaagaatttaagaatgataaaaaacacgtgtttgcaatgaacacgtgtttttttataatttaattttgatatactattctatagacatggatatgttgcaactatttgtgtttagtagttttagcataactaaccacccctcacacattttgaaattacggcggtgagagttatgcataaacggatagtttggaggtttagtgctccgtggtagcttgggctattgcaatcagcatcgttctaggtgctttaggcaatttagctatcaatttggctatagcctatgcgataacaaaaaaagctaatcgcaaggattagctaaaccaacagttatctgaaactacgatcgaagtcaacggattgcggccgtgggcttcttttcatatacagattataacatgaattatccgaaacgaataaaaaagatcaggctcactgcctgaccttgctattgggttagctggattcgaaccagcgcatgatggtaccaaaaaccattgccttaccacttggctataacccaatcttcaaaccttttacttgattggttctatttgaatgacctctcgatcacccaacagatattagtataggggaatgaagaaaaaatatcaaggaaaaattcaaaaaaattttgattttttcacatttgctcgaaggatactgaatctttcttttatgaattataaaattaatttgtttttttacgattataacttttgtgacttcttaaccttattcattaattcaaagtcgttggtaaaaattccagctacaccaagtttaaagtacctttttgctatgcttactttatctactgtccaaattctttgcgtaactttgctaggtaaataccaatgcggatggatcgctgcaaaatgattcttagccgcaaactgttcaggaaacggcaccggccatttgtttaaaaagcaatattgttggtggggatcaattcgctggcaattttttaaggtttgataattgaaggaagagaaaataatgggatgcacaaaatgatattcttgtgctaacgccaaaacgatggcttcaatcccctcatcatgaatcttgttagtcttaaattccaagttaacatacaaatcctgtccctgaagaatttcaaataattcacttaacatcggtaccggttcaccgttagctaaacgaaatcgcctgatttcacttaaggtatagtccttaatataacctgtcccattagtagttctatctaacgtttcatcatgcattactaccggcactttatctttagttaagtgcacatcaaattcgacaccttcagcgccatgcgttgctgcatatttaaatccttgcaaagaattttccgcaaatttgaccggtaagccccggtgagcaaaaataattgtctgagtcattttttcacctacaaaaaaatgccgctctcgcggcatctgctctattttaatctaagacgattgcaccttgagttgccaaagtatcacgaactagattcttaacatctcttctaactaccataccatcggtgttctcaacgtattcaagatattgagctgacttaatatgtgcatcataagccttgtcatcaaagtaaacttcgacaaaataccattcgttttcgttcttcttattgactccagacatcataatttccatgcctggttcagcagccatgctagtcgtcatttctttcttaacttcatgcgcaaacttttctgcatcttctggtttaacttcaactttaactaagcgcattacaaaatgatctgcgttatcattcaaagcatcatgagcctttgtggtaataacttcgggctttaattcgattacttctttgtctgtggaaatcttgtcgatggtttctgcaaaatcatcagcatgtgctgctgcaatgtgcaaatcttctgccaagctattccggaacaattcgatttcgtaattgtcttcaccatgagcatcgtcatgtgcgcttccaattaacaaagttccttcttcagctggaattgagttgtgcatgttattttcaacttcacggatatattcaccgcgatcgttttccttgatatttaatttagtaattctaaaaattggtgtttcatccatttttcttgcctcgtactataatctttccacacctatcattataaactaatgcagaaaaataaaagcccctattcaccagttatttgatcaattttaaccgctttagctggccattcagtccgtacatattccaatgtactgccttcattgctagttaactgcacaaaagaacaattgggcagacctaaaaattcacgatggttagttttttcattaatgtattgcgacaaactatcgccatgaccaacaactaaaatattatcgccatcttgtgcatcccgcatgatcaagttaatcccgcgctccattcgctcaactacctcatgattatcttccacgcgaaatttgcccaaacgatgcagcggccaaagtagcacattgcgtgcctcaaaagcgccatagcttttctcttttaattcctttaatcgaacatactccatctcaggcccagcaataatctctaaagtatcacttgccctttcttggggtgagcaatatgctctagcaaaattaattccctgatcttgaaaataatcccgcacggcttccgcctgcttaatgcctaatggtgttagcgctgaatcacagcttccctgcatgcggtgtcctttattaaaccaagtttgaccatgtctgactaaatataaattaattgccatttcgtcttactttaaaccctctgctggccacacgtatgaatcaaaatggatctttttaccatcaactgttagcttcacgattgaagcattgccaaaaccgccaaagttcttattctcggtagcatcgcgcacaaacttagctaaaatatcaccatgtcctacaactaaagcagtttgaccatcctctaagccgcttaaaatctcgactaccgcacggtgcattctagcaacaacgtcttcgtctttttccatagttgggtctacgttaggattattataattccaaggcaataagaactcatcacgaccttcaaaaatgccataacatttttctcgcaggtcttttaaacgcgtataaggcatttgatgatcagtaataatttccaaagtatcgcaagcacgctcttgggttgatgaaaaagctttgtcaaaatgaataccctgctttttaaaataatcacgggccatttcaacctggcggatgcctctttcattcaatggtgaatcacaacgtccctgaactttatggtaatagttaaaataagtttgtccatggcggactaaatataaagtttttgtcatattttcctcgctaaatcgttttttcctttatcttatcaaaaaagcacgcgtcgtgcgtgctttcatattttttcgttaaattttgaagttcttgttgtattcactcgaatttacaacaaaacttggcacactaatgaagtgcattgagtaaatattgccagtcttggaaatgctaaagccataataattgtagtccccatcatgacgtgagccctgtgtattaaataaatcaccggcatgttcccattcgcggtaaaggctcttatcattacgctgattttccccagctcctgcaaagccaaagatcatttgcttcaagccaaagtaaatatttcgcttcatttcagccatagacataatcttcttattagtagaaaaaccagccatatcttcgacataattatcgtttaattctaagccatgtttcttgcaagcccgtacaattccggcaacatagtgatcgccatctttgatactcttgccattttgctcgtattcttgcgcaattgaattagctaaggactctactccagaactataaacccacggcttcaaacctaattgactacgagcactattaattaggcacaaagagaattctgccagttctttttgctcactagcagaaagatcggcaagattgatcattttttgatcggctttgctttcacctgagctaacacgtgaaaagtcgttttgctccattcctttcatgcaagcctgaataaaactagcacttggcttccccttatatgcttgcaataaactagctttcgtatagccactcggcatcttcattgtagctgttacataattctgcgttgcagcagtctttttaacgagtttggcatttttagctaataaccattgagagttatttccaatcttataagccaaatattttttcttgcccagctttaaatactttttagcagaataagaatactctcttttagctacagcataatacttagacttcttgcccttatttgtataaagtctaactttcttagttcctttaacctgaacttttcccttaactgctgcttgaaccgtttgtggtgtcgtttcgtgtattacactagccgtccccatcaggcaaacactagtcaacaaagtcacaattaatttttgcttcatagctgttccactttctgtatgttttgattattaatatttgttatttaaattatatcgtatttatttaattaaaaaaatcaaaaagagacacactatcattttgaccaatgtcattaagttaagacattgacaattaagggtgcttttttagagatcgaatcatttggattcgatctctttttttgtataaaataaaggcgaaaagaccagccttttcgcctatcttatatattatatattttaaaccttcaaaattattgccagaaagatggtgttaattatgaaagcccttcataagaatattctagaacgtcttgatcaaattatcaataatactggggatcatattcacgattttattaataatcctcatgcttttaccaggaaacgcactttagatgcagcgacagtccttaaaactacaattaacatgcaaggtcagaatttaaacagtgaactctttagagcttttggcgaagatgcaactaaaaagaacgataaagtagttagtacttctgcctatgttcaacgcaaaagccagctttctcctgcttgttttaaacatattctgactgtttttaatcaaaatctatttaatattcaactttttgatcatcactaccgtttgtttgccattgatggctctgactttaatcaaatctggaatccgaaatcgaataacattgtacaagcttcttctcataaaaagaaaccctattgtcaaattcacgttaatgccttatatgatctattgaataatacctaccaggattgtatttttcagcctaaatcagaaatggatgaacgcaaagcggctgttcaaatgcttaaagctttgaattgtggtccatatattgtaacaatggatcgtggctacactagtttcaatatgattgaaaactgcaatcgcctgcctaactgtcattacataatacgaactaaggctggacaaggcggagttaaagaaataacgacattgcctgatcaagaatgtgatcgtgagatttcctgcctggtaactacttctaactattactacatcacgcataaagccagtgagaatattcaccatgtccagcatcattatcgccaatatattaagtatcgctctaaaaatacccaggatctaagctgggattttggcgagttatgcacaataaaatttcgagcctgcaaatttagaattaatgatgccaaatcaggcaaagaagaatgggaagttgtgctaaccaatcttgatcgaaaaaattatccgctaaaaagaattaaagagctttatcatctgcgttggggtattgagacctccttcaagaaattgaagtattctttaggcagtgtacagttccattccaaacaagataaatttattgaaatggaaatttatgcccatatgattatgtttaatgcaatcagtcaaattgatgcacaggcctatattccgcaaaagcattgcaagtatcaatatgccatcaatttcaagcaatcatgcttgattattcagagcatgtatttggcttcttctttaacgcaagattttgaacggatccttattcagatcagctattataccattccaattagaccaggccgcaaggacaagagaaatattaagcccaaatcagctgtatattatttatatcgcgtagcttaaaaaagcagaatctgtgctatgccttatttgttgtacgaaaaaagcaccaatttaaccaattaaatgttaaatcagtgctttaaaagtctaatattaattgtcaatgtcttaacttaatgacattgcattttgacagcatgcctcctttaagttagtttgattttatttagttttgaaaagaggtttatttttagtaccagccgtttgcttgccagaatgccttagcagcagtccatgagccataacgacctttgacatagttatcagctactcgctcttggttagctgctgaatagtcaccattcaagtatgaagctgaaagttggtatttaccaacgtattgaccatttgaagcaccgtatgagccaccagattctctaccggcaatccattccttagcactagcttctgaaccacttacagttgaagtagtagtttgagtgttggtgttatttgctgcagtagtagttgctgcagaattagtattttcagtttgagtttggtgttgtactggagcttgggttacagcagcttgagtgtggtagccgcgagttacatacttagcacgaacccattggttcttgcctaagtcataccacttgtgacctttggcatcgtaagcagtcttaattactttccatgaggtgttgcttgccaaagtttggccagtagcctctggattcttgtagctgttgtaaacagtgattgcgttgtctgaaacgttcttaactgttacaacagctgtatcgttttctacaatagcagcttgagcagtattagtgttgttattagctgctactaaacctgtaactgataaagcagttactgcaattgacttaactaagatagatttaattttcaaaaaaattctctccttaaaattttaaaagtcataagtaacgaattttcaccttattcgtccgtcccattcaattgacacagcatatactaccttgcttaaattgcagaactataacaggaatatcacctgcagattaagaaactattgcaaagtatgtcaaaattgtaacaattgtaatatttatgtaaatttattcagatgatacaaaaccgcatcagatcgccatttaactcgatttttaatttttatttgctatgtgcaaaagcttgttcgcatttaatatattgaaacacttttgcaaaacgaaaaaagaaagagtttcctctttcttttttaattctcacaaattttttattaatttattccattattctgccttatcctcttctataagttgacgtttattaagtgccgcaataaatggcaggtaaatcaaaatgtctaagataatattgattacttgcaaaattgagcccgcaatactgcctgttgccaaaaaaactgaaataattggcggcattgtccaaggaattacagtcccattacataatagaactaagcctaggttcattgcacaataagtggtaatcgcatttaacattggcgcaatcataaatggaataattaacaacaagttcattacaactggcagaccaaacatagttggttcattaatattgaacaagccaggtacgatggtcagtggtgctaaaactttattttgtttacttgcgcgcttgcgccatactaaatatccaatgcaaagcactaacccaatagtggcacctccatcacccatgtaaacaaagttatcgataaatggttgcgtaacgatatgaccaccatgagctaaatctaagttacctgcttgattcaatacacggttagcatcggtttgcatcaaccagattggttgcatagcagtattaactacgttaccaacatgaataccaacgaactagaacaagctcaataaaataattgaaactaatgtaccaattaaggtatcgcctaatgcacctagtggcttagccaaaatattcatgattacatcgtgaatattgccccatccaatccaagcaaaaagccagtaaacacagccagcaatagcaattacagcggcacctggaattaaagctgaaaagctcttagctacagcaggtggcacagtagctggcattttaatttggatattatgattaataaaccattggaaaatccatgcacttaggagaccaaagataatagctacaaataatcctctactacctaagtaagtgtaagggaagccttcaactggaactttatctccactcataatacttggcgtcaaaatgaagaatacagctgcagaaacaattccggcagaaacaccatctgtcttatattgattagcataactccaagcaattccaaaagctgcaattaagaccatgatcccaaaggagccattagtaatcttggctaaaatctgtgccaggcttataccatgaacagcagtttttgatagccaatcagaccaaccggcaactggaaatgaattaatgatcctacaataattaacggtatagccatggcgataccgtcacgaacagcaattaaaggtttaaaactgcctattttagcggctacaggcataatgtgtttgttaacaaacgcattcaaacctccgctcgatttactattagccataataattccctcttcaatctaaaaatgatctcgtgtttctttggtatatacctttcgcaatataacaatatcctgaaagcgattttattaccactattttaaaagataattttttgcttatatttttaaccaaagtttgattaacaaaatattgcagttatggctgtaagtgctatagtttacatgtaatcataaaaaaagcgaggaaataaaattatggctaaatacgaagtaaagttaagcgaagaagatttacaaatgatcaaagattgtcattcaaagaacccttcaatcatgaaggctatgaacgaagccaagaaagtcgaagattaagcaaattttgatctctaaatcgaaaaaaggcgtccgcaagggatgccttttttattggttttcaaatcttgtaccgtggggatgcttccagttataaacacggactattttacccatgccatctagcactacaacatttccatcattatgtagataaatcaatggatcagaatgtgaaccaccgtcagtaaaaattcttgctggctcacctgggtattgcactgttctaactatacaatcatcaattgatagccgcctcatttgtcgaccatcatcatattttccttctaaagcagctgttggcgtatgaccagtcacaattgttttgcccgttttgttatgagccatcattttcaataaggaatcggaataccaatacttatctcgtgcccaaatacggtaaaaatcatagtcaaatttcaagccatactctatctcagagtaagtttccggatcattatactgttcatctggccgcacacccgcatgaacaaaaatcaagtgtggcgtttcatacataataggacagccttttagaaagcgataatactcactatcacgcaactcatcaggcaaaactgtactgccaaacagactaactaggctcttgccaccaccgttataaacccaaatgccatcttgatgttcctgcttctccgcaaaattgagtaacatttgctcatgattacccagtagtacgattgctccttcgcttttttgctcaattaaataatccaatacttccttcacatgctcgcggccatcaacatagtcaccgcccgcaactaattgtgcttctggaaaatctgctgttgcctgcttgattaagtctaaggtttctaagttgccatgaatatcagaaatgaagatatagttctccttcactcgatcatccaacagcgttcgattgataatttttttcatttcatactaccccatgtgctaaattaaactaacatttttttcttaattatagcagatgtacactggttctttttctatgcaatcctaaaattaacctccggcaaaaaaaaggctacaatagatatgaaaagaagtgattgcaatgtttaatgaagaaaatgcaattgatgccaaggacttacacgttgattctttcaaatatcaatcaactgaagacatgccatctgatgcttattctagctgggaagaaaaacacccaaacgccagggtattcaagcttgaatttcgcaacatcggcgaaagcaatgaatggcaggaaatgatcattatctacactgaataaataaaaagtggaagaactccaagcctagtgtgtttcttccacctttttacttattttgattttctttttccttcaatttgtgcagaatccgttcattttctttagtacgtttttcaactgctgcatcgatgatcgaatcaaaccaatgattatcagaatcatcgcttgtttgatccttcttttgaggaccttcattttttacacgtttgtcagtttcttcattaataatggaatccagccaatcaaaattatctggatcatggctcttatcagtcatttatttttcctccatttttgatttaaattaatttatttactattctttttgactataattgagttaacaagatgaaacaagaaagaagtgttcgaaatgaaaattacattcactgacaaggcgcttgactacttaaaaagacgcgaaatcttgaataaaattctaattttaatcgccgacgatggtggtggtaaatattctatcaaaggcggcggttgtgcaattggcagtcacttttccattatttatgtagacaaagttgatcctgattatccaatcaagcttgaaaacgaccaaggaatcaatatttacacttctaaatacgacaccacaatgatgggaccaaatttagtggttgactacgccaatgcatccctcaacttaaagagtgacgaaggattgcttgatggcggcgttgatatcggcaatggcgccgagttaattaaagctcaaaagaatgtaaaaatgaccggcgttgaatggcgttgctagattaagatgatcagaaaagacagtagtttgaaatcaactactgtcttttttctatagaaattgaccactattaggatcgaatccagtacgatctgccgcggtaatctttctaattaccttacatggattccccgctgcaattacattatctgggatgtcattcacaactacactgcctgcaccaataattgaattacgtccaataattgtatctggagttacgctaacccctgcacctagccagacattgtcaccaatgccgatcgaatgtgcaacacaaccaccggcttttcgctcggctggatcaaataaatggttgctggtatacaagccaaccttaggaccaaacaaaacattgtttccaatataaacaggcgcgccatctaaaatcgtgcaatcatagttggcataaaagttatccccaacatgaatattttgtccaaattcacaacgaaaattagggttcacgaagggatgctcacctgttgaaccaaagagttctttgattaatatttcttttttagcgtgatcattctcattattaatattattggtcttcaaggtagcaaggtctctcaaggtgccaaggcgaggatccgcatcattataaggacgaccagtagccatgtaattaaattttgttctaagcgacatgattctttcctttcattagttcttctatttttattatagaaaagaaaaagcgctttcgcatgtttgacgcataatatttagcacactagccctaatcttattgcttattctataatggtaaaaaagaaaggattaaagccatgaaaaacttcaacaaatttaccgctaaatttgctcgccttttacagaatctactagtagtcgcaattggtttactcgggattattctgatcatactcttattccgcgatctaattccactttgccaatcattattttcaactaagatcgaagaaagcaactccgagattatgtcagaaattatcgttttcttactcttctttgaatttactgcaatgattatttcagccttgcgtcatcacggtcacactagcatcaattttctattgggcttaggtgttactgcgctaattcgcagtctgattacttctcatagtaacatttggagtacgcttgccacttctgcttcaattttagtactagtaatcgcaatggttattttcaataaaaatctgcgtaatatgtaaaaaaactgtatcactctaggctaatgtcattggagtgatacagttttttgttttactaattaactttgcgccatgaactcattaagttgtttcttagaaaaaacattgccatatttgcatactacgtttcctttcattattgaacgtaattcacacaaccaaaaaagcatcatttattaacaatattgaaaataaataatgctttttagtaatactctgatgctgaatgccagagtcgaactggcgaccttctctttacgagggagatgctctaccaactgagctaattcagcaaactcacaacacatgaattataccaaatgtcgctaattggcgcaacgacctttttctaagctagcattcaaaaaagaacattatttccaatctaagcacaatccttgcttgtgcaattcttctggcaattgatcacgatcagtttcatgcagatcaagttttttacctgtaatctgcttagtgaatgaatcaatgcgacggttagaatcacgtaagtcataatatgtcgtaactatatcatcatagtctttaaggtctttcacatcaaagtctttcttataactaccttcaaaacaagtgaacttaagtggtaatcgtggttttaattgtggcttttgatctggcataccgacttgcatccccaacactggaaaagtcaactcaggcaaatcaagcgtcttaagcaaatccaacggatgatcgttaaccgtaccaagtggcacatagcctaagcccatactttctaccgcattagcgacattttgaaaagcaagcagcgtatcttctattgcttggaaaaagatatcagttgtgtgaacacggccgtcgtctttgtcaagttgctttctaatttgttggttacggtacaagtcaacgataaaaataaacaaatcgccttctgcaccaacatatttttggttacataacttttgaattttcttcttttcttcaggatcggtaacgtgcagtaagctagcattttgcataaacatgctggttggagtttgaccaaagacagaatacaaagtttccagttgttctttagtcaaagtttgatccttaaattttctaatagaacggtgatttaattgcgtgtcgattgtttcgttatgtatcattttcatccttcttactaataatcagtaagttcattataacaaataatatggctacttttcttcaaattcaattccgtaatctgcttgctctccgtgctcagctaaatcaagccccattaattcatcttcttttgatactctaattggaataatccttttaagtaataaaacgattatcgtcgtcatgatccctacaaatatgatagtaaataaagttcctaaaatctgagctgtaatcaaatgcaacccgccaccataaagcaagccattttcaatttgcgggttaacaatcttagtcgcaaataatcctgtcaaaatcgaacctacaattcctgaaacgccgtgacagccaaatacatcaagtggatcatctagcttcaattttggcttaatcacatgaatgaagccgtaactggctagtgtacaaataaaaccaatggcaaaggctcctgccacagtaacatagccagctgctggcgtaataccgactaatccacacaaggcacccgtacagaggccaatcatagtagtcttttctttaataaacatatccaaaaacatccaaaccacaaatgacgtaccagttgcaacagttgtagttaaaaacgcttgtgtagctacatcgcttacagttaaggcagaaccaacgttgaagccataccaaccgatccataatatactggttcccattaaaacccatggtaagttataatgcttaacctcaccatttggatcaaaatcaattcttggaccaacaaaaattgataaaaacaaggcggtaataccggcggtaatatgaactacagtcccacctgcaaaatcaagcatccccgttttggctagaattccatctggtgtccaaaccatatgaaccattgggtaataaatcaagatcgaccaaattgcgacaaatgcaagtaaaaatttaaatttcattcttccgaccaccgcaccaacaaacaacgccggcgtaataatcgagaacatcatctgaaacattaaataggtcaaaattgtgatgcctgaatccttggaataaagcgtctttaaatcaaagccgtttaaaaagacacttttactcaaaccaaatattccaccaacatccttacccaaagccaagttataaccaaaagcaataaacaaaacgattgcgacacctgtaatcatgaatactgaaatcatcgtattcacagcattcttctttgaaaccatgccaccatagaaaaaagcaagtccaggtgtcataaagaaaactaaaacactagcgacaaaaacaaatagagtgttcgtttgattaatcatctttttttctcctcaaagtaaaatagttagtcctaatattttaaattggtatatacactatttcattgatgttgcagcatatatgcttaattaaaaaatattggtttgataaaatttaattctcattatacactcatttttcttcttgtcattaattttctataaaaaataagtgtctgggaaaaaactaagtctcagatcatgaaaaaagaacgttgaatttttgtttcaacgctctttttgtatacttttagctccagccttgatattattaaatcatcacaaaataaaaacaaaaaggtggaaactaacatgtacaaaaattatatcacaggtcaaactgctttaacacttaatctagattttgccattccggccaatcatttggctaatgtcatcagctggtttgtagattcaattccagaagatgttttagtaggcaagactgctaaaacgggccgcccagcctatcatccagccatgatgctcaaaatactgctttttgcttactccagaagagttttttctggcagaaagattgagttgatgctggaagaaaatctgccaatgatgatcttggctgaccagcaaaagatttcatatcatactatcaataattttagatcaagcagccatgccaatgaactgattaaaaagagctttatctacttcactaacctgttagaagatgaaggcttaatcaatgaaggtgctgcttttatcgatggtactaagattgaagctgatgctaaccgctatacatttgtctggcgcaaagcggttgaaaagtatcatgaaaagctgaaaggccaggcagttgaactttatgatgaattgattactaaagaagtagtcaaagaaatggaaaaagaaaaagttcaaactagtcaggggctaaaggaattagctcaagaaactgaagcagaaattaacaagctgactaaagagattgagcaggaaaacaaagccattcctggcggttcacctcgaaaagccaagcgacgtggactaaaaaagattctgcaccggctaagaaaagattatgtgccaagaatgcaaaaatatgaagaagccgaagagatctttgccggacgcaacagttattccaaaacagatcatgacgccacctttatgcatatgaaggaagaccacatgaaaaatggtcaattaaagcctggctacaatattcaagcagtcacgaccgatcaatatgtagttgattatgccatctttcctaatccgacagatttcaaaactttggagccggttttggatcaaatgaccgtgttggacaagtttgacaaaatcgtcgccgatgctggctatggcagtgaatacaattattcgatgctggaggaaaaatatccagacaagaagtactttattccctacactatgtatgaaaaagaacagaccaaaaagtataagaatgatccaactaagctaatcaactggtactacaatgaaaaagatgattattacattgatcatcatggcgtcagattcaatttcaaatattacagccagcgtaaggatcgttctactggtcaggtccgtgattttaaggtttatgaggcagacgagttccagctaacgccagaattggaacaattggctaaaacagctagcggccgccagcgccaagttcgctataatcctaactggcaatatttaaaagaaaaagcaaaagaagttctccaaagcgaagaaggcagacacatctatggcatgagaaaatatgatgtagagccagttttcggacatttgaagaacgtatttggcatgcgcagaacgcacctgcgaggtaaagagaaggtcgaaaccgatatcggaattgcctttatgatgatgaatttgaacaaatattgtcaaagaaggtggctgaagggccgatttttattgttaaaaattttaaagagaacaaaaaaacgatcaagattcttaaaaaaggaaatcttgatcgtttttattcatctggaagctatttttttcccagacacttgcatatatttgcttttaattatttgttttcgttttcaagattgttgattgcagtttcaaccaatgcatatgcttgttgagcttggttcttagcttgaacatattcgttcaagttgtcatcaccattagtaagcacacgtgcaaatgaaatttgttcagccatcaagaagttgaacaatgaatcccacttcttgtcttcaaacttgatttccttagcagaaattctaggcatcatttcacgtgtggtattaaatgccttttccaaaatttgttcatctgcatcggttaattcacgcacattgtatgcttggtggatttggtgaacctttaaaagttcttttaataaagttcttgcttgtgcatcttttgaaactgattggttaatttttaaagccatttttacctactcttttcttttttattaacaattataccaaattgtcttcgaccatttgcttaacgcagcgtttcatttctttaatatcaagaatactgtaggcaaattcttttctaagtagttcctttggcaaatattgatcgtacttgtcgattcctggcacttcgtttggataaaccagatcaagcggatcaaagtctttatcagcttcttcgcctaaaatgcgccagaagtcatgctcatcagcatccatggcaaaatacatgaagtatggtctagatgaattaaagccacggatatttaactttttaccgcacttaattcgaattaatcgctctagtgccaaaaatgcataagtcccagtccatggaaaaagacaccacatattaccgcccagcttgatcaaattattctttggcagaccagctaaagcggcggtgtctctagcttgcgtcaagcgagctttaccattttgcatcaaatatggatacatcatcttttctgcaagtacctttttcattctctgtaaaattttaggttgaatatctccaggtacatctccaaagtaggcaggaattctaccctttacttcatggcaatatacttgatgacgcttgatatccacgtcttcgacaacccatacacgtccagcaatcgcaatcttgtctcctacaggaggtggcttaacgatcgtacctaattcttcgctgccagcgtgaacactgaattcctcgttttcttggaaaactgcgtaaaatttaaagttattcacaactcgttcaccagcaagaccaacgatcagaccaccatcttcagtccactcaatgtgacctgttttaagcaagtgtttgagcaaaacgcgataatcgtcttggctcacgttgtggaaatatgacaaagttaacacccgtgaagcaagttcagctggcgtcatttcaccgcttgaagccagcgtactcatcgtctgatgatagagcaaactatatggcaaacggttaggttcaggtggctccacccatttttcttccgcatacagttgtaccaaggcaatcccttgaagtagcggccacggaatcagttctggcaacatcgctcttgattcagggtgttcttcgcgcatgacaaagtgcatctctgatggattaccgcggcgccctgtccggcccattctttgtaaaaagccagacacagtaaatggcgcgtcaatctgaaaagcagattctagtttgccaatatcaattccaagttccagcgtagctgttgcacaagtcgtcatgtagacatcgtcatctttcattgcggcttctgcagtttcacgcaaggcttgagacaaattaccatggtgaataatgaagcggtctggctcatgattataggcacaatatgctctgagctcctgacaaacagcttcacattcttcacgactattggtaaaaacaagacactttttaccacgagtatgctcaaaaatatagccaattcctgggtcagctaattctggtgccttatcagttttcggttcgatttggctcggatcaaagtccctggaacttgcttgtggatttgttttataaaaatgttccatagataaatgccaaatctgtggttcattttgtacccttggtgtaacagtttttctgtttgaaccagcacccaaaaacttgctggcatcttctaaattaccaatagtagccgaaaggcctattctccgtggatttacattagctagttttgataaacgctcaattaaacaaaatgtttgtccaccacgatcacttctaagaaatgaatgaagttcatcaaccacaatatattttagaccaccaaaaagatgcggaatatccatgtgcttattgatcataaagctttcaagcgattccggcgtaatctgcaaaatacctgaaggatgcttgagtaacttgcgcttttgtgtttgagctacatccccatgccagcgccaaactggaatatccacatctgtgcataagtctatcagacgatcgtattggtcgttgatcaaagccttaagtggcgcaatatacagaacttttactgaatcttctggctcattataaatttccgacaagatcgggaaaaaggctgcttcagttttgcctgacgcagtcgaagccgacaatagcacattatgatcggtgttaaaaatttcttcggccgccgcaacctgaattggtcttaaacttttccagccatgttcatagatataatcttgaataaatggcgcataatgtgaaaaaacgtccatagtccatttccttaaatcttaaattcggtataatccttttccgcattatccgaaacagcctctgacttggtatagctgaattgatccgagttaagcagatcagtgatctttctatcaggattctgccaaacaatgtcgagcagctcaataaagtcacgaataatttcacgtggcgtgatattggtatccgctccaacacgggcatattcaatcttaataaattgagccaaatcatcatcagtaatcgtgcgctcataaccgtacaaattggcatgcatgtcagctagtttttcagtcaaaaccaacatttcttcagcggttaatggttcaagcttaattactggcgcatacatatcacgtgctccttcttgagcgaatttgcctgaagcaagtcggctgcgtaaagcttcgtatgaataaactccgcgacgacggtctttaactgcttgtggcgtaccacacataataatgcctaagtaccttgctttgccctgcaaggtatcgttgtacatggtcaaaatcttttcatagttgtactggcggctaattgcattcggaattttatagatattaaccaattcatcaatcataatcattaaaccagcatagcccgcttgtctaaagaaagtcgcaaataactttaaatattcataccaatcactatcactaataatgatatcaacgcctaattcctttttagcctcagtcttatggctatattctcctctgaaccacttgactactttagccttagtctcatcatcaccactcatataagcgtgatagtacatgttcagcaatttagcaaaatcaaatccatgaactaattcgtttaatgaagaaatgacgccatagattttctggtcaactgcttgctcaaatttaggatcatcattatttaagcctgtttcttgcgaaacttgcatctgcactgaattaatccagcgatctagaatcaaagtcaaggcaccgccttcaggcctagtcttagttgataagttctgaattaattcacggtatgttgctaaaccctgtccttttgatccttgcagccgacgttcaggtgataaatcaccatctacaacaacaaaatttttatccatcacatagttacggatcgtttgaagtaaaaagctttttcctgagccataacgacccacgataaaacgaaagcttgctccgccttcttgaataacatccacatcgtgtaatagggcctcaatctcggcctttctccccacggtaatataaggtaaccctattcttggcactaccccaccctttaatgaattaaggacagtttgcgcaattctttttggtactcttcttttttgtggcatgatttcatcccttcaaaaacatatcttttaagtcatctacataatcggtaattacttgtggttggtcctgttcgttattttctaaaaccacatcaccgaattcatcaaataatttttcattaatattatccatcaaaattgatgccattaaatggtgctgcttcaaataggtctgccaaggctgctgcatcagcaatgcagttaagaaaaacatttcattttcatctaagccatattcattatcaactttgacagtttcatctgcttgtttttctacttcttcttgcgcttctgcctgctctagctgcttttcctcatccgttaacaaactatcacgcgtcttcgaagcattggcccgaatttgatccaaatcggagaaatcaatcttaatctgatcaatctgcgcctttttttcttgaatgtgatattcagcaatccccgcgtcaattgccttaagtacagcttgatcaataaatcgcggcttaatcgaccgacctagtttaaattctgttcgcgccactctatctaattcatggagaaaattatttaaattaacccgctgacggctgatttgttgatcacaatgaatttgccattttccttggtaaaaatgatactttcttactgcatcaatctgatggtcagctacttgttgttgtcgcagataaaaaacactgcctacaaagattggcttttcaattatatcaggcttgcccacaaacgcactgtaatacgcaatgccgtattttttagcatccagcagctccagccacacgtaacgcaacagttgaacaaataacttttcattcttatacgcgtggtgctagttaaatcgttttagttaataaaaaagtccaatcttgttagactcgacttgtaaatagtaataatagaaaagagtctgatctgattgaactgccttaagcttaagcgttttagccaccatttacaagttagttttaaagatttagtgataatttgtcggcactggtatcgtttgtatgcaccggctgagtttactcatcggcgaaatattgatcaaattaaaactacggacagtctgattttggctttacttatctggcaagctaagacaggaattgaatcacaaagaagattctgtgaatgtttcaattgtttatcacactcacgttttaatcggcgttcacgtcagctattgcaattgatttatcagatacggcaagaaatgaataaaaaggttgacctgaatggacagttcttgatcattgacagctttccggtacctgtttgccaaccaattcgaaactatcgtgctaaaatttttcgcggttatgccaacattggttataaggccaccaagaaaatttacttctatggtttcaaagttcatgccattgttagcgatgacggttacattcttgattatgtcgtaacaaaggcatcagttcatgatgccagggagacagttgaactgatagaaaatacccatccatctaattactatcttcttggcgacgaaggctatttaggcaaagaactgcatcaacagctaaaacaaatgggttacgaactttggacaccatatcgtaaaaatatgacaggagctaaaaagcacaatgatcatcaattgatggctattcgcagaacaattgaaagcgacttttcgcttctgacctattacaatgccgagaacaatcgagcacgtagtctgataggctttcaaagccggttggaaattgcaattttagcttataatttggcttattgtctagaacgatttaactagcaccacgcgtattcttattaataactttagatgaattccaataagtcgttttctttgcaaagactgctgctaactcttgcgcagtaaatttttctggatggtgtaaaacctcataatcatgatcacgcttaatctcagatgcaaagcgctgcttaataatcttttcgtctaaatcataataaagaacataatctttgagccagtcttgtaaatatacatcaatactaatgtcaaattgtcgcacatatttttcttcaaattctaacagcttttcatatccatcttgtgcgtcatcaacaccaatattgttcagtaattcataaatatacgcgtggtgctagttaaatcgttttagttaataaaaaagtccaatcttgttagactcaacttgtataataatagaaaagagcctgatctgattgaactgccttaagcttaagcgttttagccaccatttacaagttagttttaaagatttagtgataatttgtcggcactggtatcgtttgtatgcaccggctgagtttactcatcggcgaaatattgatcaaattaaaactacggacagtctgattttggctttacttatctggcaagctaagacaggaattgaatcacaaagaagattctgtgaatgtttcaattgtttatcacactcacgttttaatcggcgttcacgtcagctattgcaattgatttatcagatacggcaagaaatgaataaaaaggttgacctgaatggacatttcttgatcattgacagctttccggtacctgtttgccaaccaattcgcaactatcgtgctaaaatttttcgcggttatgccaacattggttataaggccaccaagaaaatttacttctatggtttcaaagttcatgccattgttagcgatgacggttacattcttgattatgtcgtaacaaaagcatcagttcatgatgccaaggagacagttgaactgctggaaaatgcccatccatctaattactatcttcttggcgacgaaggctatttaggcaaagaactgcatcaacagctaaaacaaatgggttatgaactttggacaccatatcgtaaaaatatgacaggagctaaaaagcacaatgatcatcaattgatggctattcgcagaacaattgaaagcgacttttcgcttctgacctattacaatgccgagaacaatcgagcacgtagtctgataggctttcaaagccggttggaaattgtaattttagcttataatttggcttattgtctagaacgatttaactagcaccacgcgtataaatataaacaaaggcataggatgtactcgttttttcaaaaacatgctggcgaatcttgctgcgccaagtaaagtaacttctaagctgcccagtattcatatcatgataagttggataaaaacgcttaaaggcaaaaaattcaggataatcatcatcatagtcggccatcatcctagcctgttgataaaaattcttagctcggccacgactgggcaaaatactgtagtcataaacttctagcatctttctaattctatctggaaccagactattgttatgcttcttgcgaagattttcacttggtttaattgcttgggcttgatagcggtcatctactttatctggtgcaatataaaaatattgattctgggcgatatttacttcatcaccattcatcgccagtttaaaagcaaaatcaagtgcttttttgagtgaatcttcactaactttttctaatattgccccaacccaatctgccgccttgatcttcattggatcagtgaagccaggcaaatctcttattagtgcagccattgcaccacatttcaggtccaatatactctgaccttgcccacgtgataatatcgcaaaataaccactatcaactggtgacattaaaacgtaaacgctagtggaacctggtacagcaggcttaaatttcaaaccatatttggcatagacatatttgaagagttgatttgaatccattttgtctcctttttttcgcacgtacgttcattatatcatcgatttattttttaccaaagtcacgcatgtcagctcctcatgtacatttttaagtttcataaattttatatttttatatttgtgtggttattaacaaacaattatgttactatagtttatgtaagttattgaaagcgtttttataaaagcttcctagagaggacaaaaacttaatatgagtacaaaagaacgttattctcaagatgaattaagaaaagataatccaatgtttagccgcactcgtgccactattgaaagtgcattttacggcaacaatgtccacgaagtaaccagtgttgcagaagcttataacttagctaagaagcaatcaggcgttattgttactgacttgccaatcttacacactaaggaattaggtttgccacatggcgcaacccaattggtttacaaccacggcaagattttaggtagaactgctagcgcccgtcactttgttgacaatcctaatgaagatgctgaagcattggacggcaacctacgtgaagatatttacaaggggcatgaacaaaagtacttaaaggctactgttttagtaggtcttgacccatcattcactgttaaggctcacattatgatgccagaagatcaagccttcaaccttctttcatacatcctcaacttccacttcttcgacgatgaagctgaaaaattatacgaaaagtcaaagttctacgatgaaccagacatttacttctacttcgatccaaatgttcaagacgaagattaccctaagggcttaggcgtgtttgacgctccacataactgtgccgctgtatttaaccttcgctacttcggtgaattgaagaagggtaccttaaccttagcttgggctatcgctcaccgtcacggctacactgcttgtcacggtggtgaaaagtcattccactttgacgataaagacgacaagacctttgcattctacggcttatcaggttcaggtaagtcaactttgactcacgaaatgtacgatggtaaatatgacatcactgttttacacgatgatgccttcattatttcacgtgaagacggttcttcagtagccttagagccttcatactttgacaagactcacgactacccagctggccaccacgagactaaatactacaccactattatgaactgtgatgtaactttagacaaagacggcaagaaagtcatcgtaactgaagacttacgtaacaacaacggtcgtgttatcaagacccgctacactagtcctcaccgtgtagactttgaaaagtcaccaattactgcattgttctggattatgaaggacggttcattacctccaatcatcaagatcgatgacccagtattggcaactactatgggttgtactttagcaaccaagcgtacttcagctgaaaacttacctaagggctttgacatgaatactttggttattgaaccattcgcagacccattcagagcttacccagtttcaggtgactacagagacttcaaggaattgttcactaagcgtggtgctagttgctacagcttgaacaccgacgcatttatgggtaaagacattcctaaggaagttactaagaagttaattgaagacttagctaacggcaatatcaaagacagtgacttcaagccatttggtaacttcaagggtgtatcatacttacctattgaaggctacgaagttcaccttgaagacccagaataccaaaagaccttgaaggatagaatgcaagatcgtttgaactggctcaacaagtacgatgaagaacacccagaaactccaattcaagatgaagctaagaagaccttggaagctatcatcaaggaattgagctaatattaaggaaatgaattagtgtctcattcaattaaaatttaatttcttaatgacgaaaagacgagagttgaaattcagctcccgtcttttttattgctcaatgtaattttgcttctgtagtttggcatctatcagtttataaacttgcactttattctcttgtgcaagttgtggattatagttatgtgctatttcaatgacaatagccggcaattggtagattatcttatgaatggcatcactatttttagggtctaaacttgaacaaatctcatcaagcaaatatatcttcttagaacgaattagacctctaactaaagcaagtcgttgtgcctgaccacctgataaattgttcgcgtcatctgaaattaatttatctaaaaaatcattgccaaactcatgaatcagtcccatcttttttgcttcatgaagcattagatcatcaggtatgttttgcagaagtgatagattctccctcactgtaccttggaataaccagattctttgcgagatcttgatgaaatcggcaggattaatttgatgaccagcaaaggtgatttcaccgttatacttcagattattagcaatacaattaattaatgtacttttcccaatgcctgaagccccagtaacaatgatcttgtcatgatcacgcaaagttaaatttataccatctaaaattttcttatcaccatatgaaaaagacaaatcttttattttcaaaatagcttgagagtcatgattatcttgtttaacactttcactttcttcaaaattatagctttttatttttctaattgcatcggtgctatgaatttgagtctgatacaaagcaattgttcttagatatcccacaaccctatcagctgacaaacttaaagttataatggccgctaccgttacgttaaaccagcctctctgcataaaaagcaagccaataaaaattggtagcaatagtgtaactaaagagattaaccatgcaatgaattgtacctggaattgacaattattcatcttacgatatttgtcttcctcattaaccaagattcgatcaaatcgtttaaagaaaagatgtctgacaccaaaattcagtatttctaagcgtccttcaaatatatccttcattgcctgaatcaactgtgagttagatttattccatttttcggttttctcattcatcctcttcttgccaatatagcttggaatcagggttagcgctgaaagaagcaaataaataattcccaaaatcagattagtttctacaacaactattgccgatgcaaccacattaaatacaaactgaactatgtcagttatcccaaagaaatatttttgttcaatttctttagcagtaccactaatcgaattgattacatctgctcctcttgcttgcttcatgtctgaattagcaaatttagaataaaaatattcttgctttaaagcaatatttaatagcatcacaattctattttgaaccaaataaaacaagagcatggctatgtagactatcagatatgcgccaaaggctaagccaataaatttataaacgtggtcaatgttactaaaattgatattagttaattgtccaaacagtacagcatttaataccccttcaaatgctgaaatggccgataaaaccagaaaaactatttgtaaatatattggaacatgttttactacccatttaaaatttatttgttgtgtgttcattgtttaatacccacatatttctcataatcaacaagccaatcttcatcatttttataagaatgattcatacactttttaaacccaattgctttaaatcatcttcatctttagtttctaacaattgtcgctcttctagagacaagtgatacttattcactaaggcatcaatattctccaaagaaatatttttaccatcagaaagatcctttcttcataccttcagacattactatacctcctattttctctcgttaagtaatgcataattttcaacttgcaatttactgtgtatgggattgatatcaatgcttcccataattccccaaatgcttataataataacagtaagtattctcttattttttaatttcaaagccaggaattcattatgtacggtcaaaaatttaaagcacttcgtcttcaacaacatatttcactagagcaagctgctaacagagttatctctccatcgactttatccagatgggagaataataagattgatattcgcttcaatttagttattaagcttttagacaatattcatataaacctaaaagagtttactaattactgcaaaattaatcatagtaatccatttgttgcgaaagtggctatgtactatgaagccaacgatgatcgtcatattttgcaattaatacaaagcaagaaaaaagaataccaaaattcacataatcaatttgatttacttctactagctatcgcatgtaattgttattacgatctaactgataacaatgttttcccagtgagctatcaaaagaaattattctacattttatctaacattgaatattggacagagatgtacatcaatgtttttggtaacactgtttttctctatgacagcaaggaactatatagtatttcaatcagaattcttaaaaatttaaattctaatacatttaatgattttcaagaatattattatgctttatcctctgtcatcaacgccctaaccgctctaattatcaaaaatcccaaattagcatcacagcttttaactaaaatagagaaagtttcaattcctaaaccaatctcttacttaaaaattagaactaatgtcctcaagtatcttttagattaccgtttaggcaaaacagatgaaaagcttatctcaattaagctagaaaatttaaagtggttaggattaacagatattgcaaaagacttaactttcttctttaaccgtataaaaaatgatcgttcacctctttcctaattcatttgcctattatattaccctcatttttatctaattgatttttctttgcaaatatgcaaaattatttttagcaagaataaaaaagcctattaaatctaggtgtttacaaaccctgatttaataggtcttttatgcgtcttttttattgctcaatgtaattttgcgccttagttaaaatatccatcttctcatgttcagttaaatacttttgtgcttctgccaaattgacccatttactagctaaaatttcttctttttgaatgttaacctcttgtcctgcaacatagctagcaacaaaataaactactgtcttagctttatcaacagtcaactgatattctgttttttctctaaaagtaaagtcaaaattcggctttaaaccaacttcttcaaaaacttctcttctagcagcttcctcagctgtctcattattttctaaatggccttttggaaagccccaattatgatttacgacgctctgcacgatcaaatatttcagctcgccgcttctacgttctctgtaaataactgcacctgcagaatgttccatcttcatttttgtcacccaacctttatattgcataattattaaatatttattaacgtatgtcaagcaattgtaatcaaaaaaatgaccagatctttgacgatctagtcactttattcgcagacgaaattattaagttctattggtagaatattttaagttacttcttcaagttcttttcgcagtattccttgaccttgtcatcatcggccttaagaatccattcaactgcagcctcagtcttcatggtgtctcgaccatttacttccatttcgtggtcccaaatagcgtcacgaataggcatttcattacccttagcccagtcaaaaacttgatccatatttctatcaattaatgcagtttcttcaatttcttttgcatctgccataattaaaagcttcctttctgataacgactttattgtagttctattagctacaactgttaacaaaaagggacttttttatttaaattctaatttttgccattaactgcttcatcagccttattcactacactaaccgcattaagtgaacgaggataaccaatgaatggtacgttttgttcaatgaccttcatcaagaattccttgtcattgcctaatttgatatttgcttgagcatgggccatcaattgaggttcacagccaccttgagctgcaatataacagaaggtaatcatttcacagtcattgtcatccaagccttttctagtgtagtaatcgccaaagcaattatcaactaaccacttattgattgttcccttcttggcaaaacccttcatttgtggaccaaacaagcgcatttgagtttcctcacccttttcaaggcgattgtctagtgtagtagttgcttgacccgcaagaggtaattcaacgccgcgcttagttaaaacatcattagtaatcttgaaaaatggggaaactctacccaaacctaaataatcaaccgcttgatataaacttccttagcttcaactgggttaacaccattgtctagtacgactggaagcattatttcatattcttccttgccttgcatccccaacaaataagctaaagttgacaacatcttagtccggtcgggcaaatcaacgtctttttgcacttcgtcaaaagcaaaatgattaattctttccaaagcttctggatcagtagccttcaataagttggcatgtactctttatgcatcttctttaattgacataataaattcctttctaaacgcttatctctactatttatttaagtacgattgagtctaaaagaaaaatatctattttttattctgcaatataacttattcttatcaaaaaaatgtgtctgggaaaaaactagcttccagatgaataaaaacgatcaagatttccttttttaagaatcttgatcgtttttttgttctctttaaaatttttaacaataaaaatcggcccttcagccaccttctttgacaatatttgttcaaattcatcatcataaaggcaattccgatatcggtttcgaccttctctttacctcgcaggtgcgttctgcgcatgccaaatacgttcttcaaatgtccgaaaactggctctacatcatattttctcatgccatagatgtgtctgccttcttcgctttggagaacttcttttgctttttcttttaaatattgccagttaggattatagcgaacttggcgctggcggccgctagctgttttagccaattgttccaattctggcgttagctggaactcgtctgcctcataaaccttaaaatcacggacctgaccagtagaacgatccttacgctggctgtaatatttgaaattgaatctgacgccatgatgatcaatgtaataatcatctttttcattgtagtaccagttgattagcttagttggatcattcttatactttctggtctgttctttttcatacatagtgtagggaataaagtacttcttgtctggatatttttcctccagcatcgaataattgtattcactgccatagccagcatcggcgacgattttgtcaaacttgtccaacacggtcatttgatccaaaaccggctccaaagttttgaaatctgtcggattaggaaagatggcataatcaactacatattgatcggtcgtgactgcttgaatattgtagccaggctttaattgaccatttttcatgtggtcttccttcatatgcataaaggtggcgtcatgatctgttttggaataactgttgcgtccggcaaagatctcttcggcttcttcatatttttgcattcttggcacataatcttttcttagccggtgcagaatcttttttagtccacgtcgcttggcttttcgaggtgaaccgccaggaatggctttgttttcctgctcaatctctttagtcagcttgttaatttctgcttcagtttcttgagctaattcctttagcccctgactagtttgaactttttctttttccatttctttgactacttctttagtaatcaattcatcataaagttcaactgcctggcctttcagcttttcatgatacttttcaaccgctttgcgccagacaaatgtatagcggttagcatcagcttcaatcttagtaccatcgataaaagcagcaccttcattgattaagccttcatcttctaacaggttagtgaagtagataaagctctttttaatcagttcattggcatggctgcttgatctaaaattattgatagtatgatatgaaatcttttgctggtcagccaagatcatcattggcagattttcttccagcatcaactcaatctttctgccagaaaaaactcttctggagtaagcaaaaagcagtattttgagcatcatggctggatgataggctgggcggcccgttttagcagtcttgcctactaaaacatcttctggaattgaatctacaaaccagctgatgacattagccaaatgattggccggaatggcaaaatctagattaagtgttaaagcagtttgacctgtgatataatttttgtacatgttagtttccacctttttgtttttattttgtgatgatttaataatatcaaggctggagctaaaagtatacaaaaagagcgttgaaacaaaaattcaacgttcttttttcatgatctgagacttagttttttcccagacacatttctattaggttatttaattagtttttcttgtctgcttcagcatcatggtatgacttaacgatttcatcaactaattctggatcatctttcaaatcagtagtttctacaatgacatccttcaagtcttcatctttaagcatttgcatcaacttaacgctttccttgtcgttaggttcatcaaagtgataaattctaccaacagtttccatcaatgcactgtagtccaaacctctgtccttcaattcacggattggacggataaatctttcattgtagcctaacttacggattggagttctaccaacacgagcaatatcatctgaaatatatgggttttggaatctgctcaaaatcttgttgtggtattcttccaaactttcttcggtgaattccttgttccacttgtggtaaagaagtgaacgggtttcactcaagacacgcttaacttgctttaaaacaaatggatccttaatagcatccccaatagtgtcatagccaaggctcttgccagtataagcaacagttgcgtgtcccgtgttaactgagaataactttctttcgatgtaaggttcaaggtctggtgcatagtcaacgccctttaacttgatatccttgttcttcatttggctttcgtcaataacccattccttgaagtcctcaactgagacaaacaatggatcgtcattatgttggataggaacaattctgtctacagctgcgttagggaagccaatgtacttgtctagttcaggcttaacgtcatcgtccaagtgcttataaacttcttcttttaagtgttctgaaccgccaatcatgttttcacaagcaatcacatcaagtggagtagtgttgcctgattgaattctagcagttaatcctttggcaattaatggagcaatgattgccaaaatctttggaccaatggcggtagttatcatatcggttgatttaattgcttcaactaccttgtctggatccttagcattgttaattccatcaacatttgaaacatgaattctcttcttaccaggtgcggctaattcaatgtcatattcaccacgcttgtttaattcatcaataatagtttcattaacatcaacgaagtcaatgccaaaaccattatctgctaaagtttcaccaataaatccacgaccaatattacctgcgccaaaatgtactgctctcatgtttaatctcctacgttctttaataaatcaataatttcttctggtgtttgtgcgtctgcaagctttgcaacgttggaaacatcactacagaaaatagcaatctgtgacaaaatatttaagtgttcattgttcaaaccagcaatcccaaagacaacggttaccaattgctcggtatcatccttagggtcactaaaatcaacgcccattggaatttggactaccgaaattccagtttttttaatgtgcttcttaccttcgtcagttccgtgagggatggcgatgaaattacccatataagtcgacacatcttcattacgggcaagcattgaatcaatatactctggttcgacacagccgccatcaactaataattgaccggccattctaattgcttgatcccgcgttggtacgtcttgattaagtttgatcatttttggatctaattgtaatgccatttagctcatccctttctaattcaacttttgaatagcttcgccaagctttttatctttaagtaaatcatcaacaactagggtttgaatatcactgtatctgacagccaagttcttattagcagctggagtaacaattactaagtgacttggatcatcagtcaattcgttgattcttactgccttaacaggagtagtcttaccagccttcttaattgcgtcattgaataaactagttgccatagtagcggtacctaagtgttgatcgtgacggatgaagtccacttctttaactttactgaagtcgattccttcaagtgaaccaaccttcttaactggtttttcagcctttggcttatcttctacttgagttaaagctttgaagctagctacgattgtgtcatatttcggactactcaagaagttgccaaccgccacgtgcattgcatgtggagtcttttgtaaagcgcggtcagctaattcttcttgcgtgatgatcaacaaaccatcttcatctttcaagtttctaacagcggtattggttactgaaaccttaatgccagccttcttgaatttatcacgcaaaagtgaagcacccatagcagatgaacccatacctgcgtcacaagcaaagataattttcttaacattggcatatgacttaactgattcatgtgcatcttcagcttccggcattgattgacctttagattgggccttcatggcttgcatttgggcttgttttgcttctaactcatcaccagtactcttgtcgtttttaagaataattgcggcaataatgaatgaaacaactgcggcgccaagaacaccaacaatattaccgaaataagcatcctttgcggaaacaagcaagatagctaaaattgaaccaggtgaagcagctgcttttaatccaccaccaagagtagtgaataagaaagtaccagtaacaccaccaccaatagcggctaaaatcaatgatggtttcattaatacatatgggaagtaaatttcatgaaccccaccaaagaattcaatgatggcagcaccaggagctgagctctttgacttacccttgccaaataaagtaaaggcaagcaagattccaagtcctggacctgggtttgattccattaagaacaaaactgacttaccaacttgtgcagcttgttggatacctaatggaactaagatcccgttaccaatagcgttgttcaagaacaaaactttggcaggttcaataatgatgttggctaatggtagtaagtgaactctaataattgcatttactcctgcactagcccattgactgccaacttccataatcggtccaatgataaagaaggcgaaaatcgcagcgatcatgcctagaataccaagtgaaaagttattgtagatcatttcaaaaccagatttaatcttgtcctggaatacttgatctagtttcttcaataaccatgcactaagcggacccataatcatggcacctaagaacattggttgatcagtaccaacaattacacctaatgtaccgattgcaccagcaatggcaccacgttcttcataaaccatgcgaccacctgtataaccaattaacagtggcaacaggtaatgaagcattggttgaactaagttattaatttctttgttagggaaccaaccgtgtggatacataaagaatgcagcggtaagtccccaagcgataatggcagctttattcggcatgatcataccggataaagctgtaccaaatttttgaaccttcactttaacagaagatttactttttgcttgagccattttcttcttcctctctcatcaacttacatttttattctaagtcaatcagtaagcgcttacaatgaaatgaaaatagaactctggcacacttttgtgccagagtctgagtttacctattctattaagcttttgaactattggttacctagtaaccgatctttgaggtcttgtaaaaaaagtgccgcaattgcttctttaatttctttttgactgccatttgtaaataaatctaagttttgactagacatgataatcatgctggaaatagtactcattacccgctgttcgggtgcagtaagattgtctggtgccagcatcaaaagaactcttttgacttgaatggtatcatgatccattgattggagcgagatttcattatctaagtcaaacatggtaaatgaacagcgtgtaatttctggactacgtgtgtgtagcaatgcgatatggctgttagggatgccaactggtgccattcgtacacgtttgagaagatttttggcaacgggcatttgcttacgaattagtgttgaatccgaatgggctaaacattcctgaattactgcaattaagtcttgcgaattgtattccagttgttgaatcttgattccgttgactagctccgagcaaaataatgtactaatcgatagcttagcaagttgttcgactgaatggggatgtttttcttcaactacctgtttagctggaactggttgaggatatttttgttcataatcttttaagtaagcgcggatttttattaattcatcatcaagcagtaatggactaacaagtaaataatctcttgagaagcccttcaatctcaaggttgaaaaaataagattgtaatttgacaagtctatttgatttaaggcagaaacacggctggttttgacttctttgatttcagaaaattctctttttagtttggcacctaagattgccgacgttccaatgccattttcacaaattactagggccgataaattacgctgctgattgcgactcgtgtattcattggcaaaataaagcaagatcaactgcaactctgacgctgtcaaataattttctggaaacgctaaatgccaatatttttgaatagctagatataaatcaggaaacttttgactaaggcctgccagaatttcaataggtgtatctggtaaaagagctactttatgttgtactaaaccaataacgtgtttcgtcactttagtcataaaactatgatctttttgaaaatcccaatgcatttcttcagaaacgtgttgaacgaattcttttactttgactgagattgctaattcgcgctcattataagtcaagtaagtgttgtgataatcacatgataataacttattagctaagtatgagacatcattttggtcaacctcaacttgccgcttttgcgcaaacaaggccataaaacggtaaacataaccctgatatttaagtgaatcagcactggggtggataaaatctagcttgcatcccgccagagttctttttatcgttaccgcaaaagttaaaattaactcaatcagcttttggtcactgtctagcttaattttaccaaacacgctttttttaagacaatcagcaacctctactagcaaagccttatcaatcattgtcaaaaacatgtctttgcttgtcgtttcattatgcagatacttaaaaaagttatattcattgatctgattgagcataatatcaactaaaacctgacgccgtattttttcaggcgcctgaattaacagtcccacaccctttttgcggatcaagtcaatatgatatcgttttagcgacctttcaaccgtattcaaatcactttgaatcgttgcttcactgacattcaggtcaagcgcaaattgaataattttacatggctccgtacttaaaagcaacttagctgcaattatcttctctcttttagctaccgaaattacattttgactgtgagattgttgcacagattgcttaatttcttgtaattgctttgaatcgccagataaaaaatattttcctttttgattttcaattttaaagtcgttcttctttaaatcgccaaattcgcgataaaccgtccggcggctgatctttagactctcttcaatttgtttgatacttaccccactcggatttcccaacaaaatttgaagaatgtgcttttgccgttgtgttaaaaacatcccatcatcctcgcttacgtttaagtttattatacttgaacgcaaaaaaagaagacagatctcaaatctgccttcttgaggatatttatttacatattaattattcaacagtaacactcttagcaaggttacgtggcttgtcaacatccaaacccttatcctttgaagcgtagtaggcaagaagttgagttggaactactgtcaaaagtgctgacatgtagtaattaatttctggcaacacgatcgtgtcatcactatttgcgaattccttgcctacaatagtaattactgaagcaccacgtgaagcaacttcttgaatattaccacgagtaagatctgcagtaactggatcgttaatcaaggcaataactggagtgccatcttcgatcaaggaaatggtaccgtgcttaagttcagctgcagcaaagccttcagtttgaatgtatgaaacttccttcaacttcaaagcaccttcaagtgcaacagcgtgatcaataccacgaccaatgtagaatgcgtttcttgattttacaatatattgatcagctaattccttaagcttttctttaccgtcaacaatttgttggataccttcagcagcgatggctaaatcatgttgtaagtcccaatccttagcatcttgattaccaagtttttcaccaagtgccttagctaaaatagcttgtaaggcaacttgtgcagtgtaagccttagttgaagcaacggcaatttcaggacctgcacctaaaagcattgtgtagttagcttcacgtgataaagttgagccttcaacgttagtcatagtcaaacttggaataccacgcttgttagcttccttcaataccacgcgtgagtcagcagtttcacctgattgagtcaagaaaataaagaatgggtgcttgctcatcattgggaagtggtaaccagcttctgaagcgtaaccaacttcggtaggaataccagtgtagtgttcaaaaatagttttaccaactaaacctgcatgataactagtacctgcagcaaagatataaaggcgatcagccttagaaatagcatcaataatatcttgatctacctttggttcaccattttcgtcaaggtagttttgtgacatgtgacgcattacgcctggttgttcatcgatttcttttaacatgtagaattcgtaagtaccctttgaagctgcgttagggtcgatgttcaaaacgtgaggttcacggtctacctttttgccatcaacagtttcaatagtgtaagaatccttggtaatgtcaccaacatcaccatcttgcaagtcaacaaaagtcttagtttggtcaagaacagaaatagcatctgaagcaatgatgttaaagccatcaccgattcccagcatcattggtgacttgttcttagcaataaatacgtggtctggttctgtgttgtcaacaagcaagaaagcatatgaacccttaaccaacttcaaagcttccttaaatgctgaaaaagcgtctaagttcttatcacgtgcaattttaccgatcaattgaacaactacttcagtatcagtatctgagtggaacttaaccccttgcaagtacttttcctttaattctgtgtagttttcaatcacaccattgtgaactagatagaaacgcttggtttcatcaaaatgagggtgagcgttatctacagttggcttaccgtgggttgcccaacgagtatgaccaataccaactaaaccttgttcatctggagtcaacttttccttcaagttagaaatacgaccaacagccttagttaagtattcgttaccatttaaatcatttaagtaaatgccagctgaatcgtaaccacgatattccaagttggttaatccatttaaaataatatctcttgcaggcttacctacaactccgacaattccacacataattttctcctttggtctagtttgctttgaagtaatggactagcttatttttattgttacagtaggtataatagtctttttgcaaaaatcggtcaagtacaaatattcaaaattggtattataattttaagcataaaaaatggctaccagaatttgctccgatagccatttttacttaagtcaattttaacttttattacttgtttttgatacccttaccttcatagcagtctctcatcaattgagaaatttgactaattaatggagctgatgggttagtaacagtgttttggtcgccataagcttcaacagctaattggtccaccttcttgtcaaactcagccttatcaacgccataatccttgaaggccatcttaataccaactgattcagccaaatcaataattttctgaactaatttttcaattaattcagcatcacttgaaccagttaagccgattgctctagcaatttcagcatagtcgctttcagcacggtaaactgagtaatgtggccacatagcaagtttttctggacgcttagcattaaagcgaatgacttgtggcaaagcaattgcgtcactgacgccacttggaatatcaaaagttgaacctacggtatgagcaattgagtgttccaagccaaggaaggcatttgaataagccattccagcaatcgtagctgcatcatgcattctctttctagcatcaagatcgccatcgtaagacttcttcaagttagcgaaaattgctttaatagcttcaagtgaccaaccacgagtgaagtcagttgccatggttgaaacataactttcaattgcgtgacctaatgcttcaaaacctgaccaagcaattaaacgtttgggcagcgtttgcacaaattgatcatcaacaattgaaacatcaggtgttaaagcatagtcacataaggtatgtttaattccagttttggcatcggaaataatagcaattggggaaacttctgaaccggtacctgaagtagttggaatacatacaagttggacaccattaatctttgggaaacggactactctttttctaatgtctaagaatttttggtaagcctcttcaaaactcatttctgggttttcgtagaataagcgcattgctttagcagcgtccattactgaaccaccaccgatagcaattacaacgtctggcttgaagatgttcattctgtgaacaccatccttgatcacatcagtattaggatcaagagttacagccttaaagacttcatattctttttgacctaaacgcttagaaatgatatcagtaacttcatcagcaaagccttggtcagctacaccttcatcagttacgatgaagaaacggttaacgtttggcatgtgacgaaggtagttagcagcgttatgttcgaagtaagtctttgatggtacctttacccattgcatgttatcacggcgtctagccactgttttgatgtttaacaagtccttagcaccaatgttgtgtgagaaggtattggcaccatatgaaccagtacccaaggtaagtgatggcaacatattgttgtaaaggtcaccgataccaccgagtgcagctggtgagttgactaagatacggcaagcatccatcttcatggcaaattcatcaataatcttcttgtcatttgagtgaagaccagcggtgtgacctcgaccaccatagttcaataaatcggtacaaatcttaaatgcatcgtcatggttcttagcacggtacaaagtgaagactggtgaaagcttttcagctgatagtgggaagtttctacctacgcctttatattcagcgataattactttagttgtctttggcacatccacaccacaaagcttggcaatttcataagctgacttaccagctactggaccagcaaccgtaccacgacgaggatcaataaagtgttcctcaaacttcttaatttctcctttgtttaagaagtagcagttccacttcttaaattcttctttaactttgtcataaatttcagtatcaacgacaactgaattttcagaagcacaaaccataccgttatcaaagttctttgataaaacaatgtcataaactgcacggtcaatattagcagtcttttcaatgtaagaaggaccattaccaggaccaacaccaatagctggcttgcctgatgaataagcagctttaaccatacctggaccaccagttgccaaaatagtttgaacacctgggttagtcatcaaatcggtcgttgcatcaaggcttggttcttcaatccattgaacggcatccgcaggagcacctgcagcaacagcagccgcacgaatgattttaccagtttctacacaacatttttgagcctgtgggtggaaaccaaagataatggtatttctcgtcttcaaagcaagcattgccttgaaaataacagttgaagttgggttagttactggagtaacacctgcaataacacctttaggttcagcaatcttagtcaaacctaattccttgtcttcttcaatatacgccgacggtcttttcgtgacgcaaactgttccagatattttctgaagcatacatattcttggtagttttatcttcaactacaccacgtttagtttcttcaacagccattttagctagtgggtaagcattttgttcacctgcagtagcaactgcttcacagatcttatcaacttgttcttgtgtgaagttagccatttgatctaaagcgacatgtgatttctttactaagttatcgaccatgtcgtagatttgctttttcttttcgtcctctgtaagagtctctttttgttgtgtcttagccattgtattattacctctaagatctactaattcttgtgaactaatttacaatgtcaactatagcacaataactttatttgtaaatgcatgaatttatgaaaatagtgaattaacaaagattcacatttcctcataatttcgctctaatgcaaatgaaagctattccttaattatttgtttgtgaattaacaaacttatttttaaaaaacagatttttgatatttttttaaatctaactatagagtctggtcatactaattgataatgataaaatattaagtatacgcgtggtgctagttaaatcgttctagacaataagccaaattataagctaaaattgcaatttccaaccggctttgaaagcctatcagactacgtgctcgattgttctcggcattgtaataggtcagaagcgaaaagtcgctttcaattgttctgcgaatagccatcaattgatgatcattgtgctttttagctcctgtcatatttttacgatatggtgtccaaagttcataacccatttgttttagctgttgatgcagttctttgcctaaatagccttcgtcgccaagaagatagtaattagatggatgggtattttccatcagttcaactgtctccctggcatcatgaactgatgcttttgttacgacataatcaagaatgtaaccgtcatcgctaacaatgacatgaactttgaaaccatagaagtaaattttcttggtggccttataaccaatgttggcataaccgcgaaaaattttagcacgatagttgcgaattggttggcaaacaggtaccggaaagctgtcaatgatcaagaactgtccattcaggtcaacctttttattcatttcttgccgtatctgataaatcaattgcaatagctgacgtgaacgtcgattaaaacgtgagtgtgataaacaattgaaacattcacagaatcttctttgtgattcaattcctgtcttagcttgccagataagtaaagccaaaatcagactgtccgtagttttaatttgatcaatatttcgccgatgagtaaactcagccggtgcatacaaacgataccagtgccgacaaattatcactaaatctttaaaactaacttgtaaatggtggctaaaacgcttaagcttaaggcagttcaatcagatcagactcttttctattattactatttacaagtcgagtctaacaagattggacttttttattaactaaaacgatttaactagcaccacgcgttaagtatatgtgaaaagattgagaacattggggggcttatatgagtgagaaaaaaacacagaccgcttctggttataaacgaaccctaagcaatgcacacattcagttaattgctttaggtggaacaattgggaccggcctttttctgggggttggagacagtattcaccgcgccggtcctagcgttatcctgatatatattattgtcggtatcttcctcttcctgctaatgcgggcactgggagaactaattatgtccgacttgaacaagcacacatatattgattttattgaacaatatttgggtaaaaatattggctttatcacaggctatttgtattggttaagttggattaccttgggtatggccgaaaccacggccctaggaatttacttcaagtattggtttccaacactgaaaccttggattccaggaattattaccattgtgatcttgctgttaatcaatttaatttcagctcgtgtctttggcaacttggaattcagttttgccattatcaaaattgtcacgattattgccttcgtcatcttgatcctttacttactagtaactggtggcaaaaccagctttggtcctgttagctttgctaaccttgacgatcatggcggcttcttcgcccgtggcagtaaaggattcttacaaggatttcaaatggtaatcttcagctttattggagttgaattaattggtttaaccgcggctgaagcacaaaagccagagacaacgttgaagcgagcaatcaatcaattaccaattcgaattattttgttctatgtcatggctattttaggaattttgttagtaattccatggtccaaagttgctactaacgctagtccatttgttgaggccttaggtgctactggtattaaaaatgctagttctattattaattttgtagttatttcagccgccgtctcatcaactaacagttttttgtatagtgctggtcgattacttttctctgttacttttgacggtaaaggaaaatggaataaaacttttggacatttatcaagaaggcagcttccacaaaatgcattgactttatccgcattattgatgggatgtgcaccactaatcaccttggttattggcgatcaggcctttaattttatctcatcaacttcaactagtatgtttttaatcatctggagtttgatgattttaactcacatggcttacaggagaaaaacagcagctaatcagctaaacgattttcaaatgccaggttacccttatatcgattatgtaatcttgtcattcttcgttttaatgattatcctgctattgattttaccaagctaccgagtaccaatggtcgctgcaattgcaatctttattgttttatacatcattttcaaaatttggagtaatgaaaaagctgtttaaagcaaaaagtcgagttttttagctcgaccttttattttgcaatttttttaattattttagcaggatttccggcaactaccgtattagctggcacatctttggttacaacggcattagccgctacaacggcgtttttacctaccgtaacgccaggcaatatcgttgctttagcgccaatccaggcgttttgtttgataacaactggctttaattccagttcttttctatgctgtggatccagcttgtgattaactgaaatcaggtaggctccaggcccaatcaacacatcgttctcaattgtaatcccgcctaagtcgaccatcatcacattggcattaataaacacgcgctcgcctaatttgatgttgtgcccataatcagaataaaatggtaaccgaatctctatactagcagctattttatgaccaattatttcactaatcaattgtctaacttcacagctacaatgccgttgtgtatttaaattctgcaataatcgctgattctgttgggctagttttcgacgtaaatcgtgatcttctgtttccattattaccactcctttttcttgctctacttcagtttaaagggtaagcttatcaatgtgcaaagcttataaggtatgaagtataataacaattgtttataggtgatttaaatggaattacgtgttttaaattattttgtcgctacagcgcaagaattaaatatgacgcgagctgcacaaaaactattagtctcacaacctgctttatcgcgtcagatagcagatttagaggatgaattaggcgttaagttattcaaccgccagccgcggcacttaaccttaactcctgcaggacagtatttatatgaacaagcaaaagaaattcttactttagcttccaaaaccaagagtaacctacaatctagtgctgtcatcagtggtgacctaactattgctgccggcgaaagttttgccatgcaacgtctaatgaatatcgtcagcaacattattcgggattatcctacagttaaaattcatattctaagtggcgattatgaatttgcagaaaggcgtttagatacaggtgcagttgattttgccgtaatcattggtaatctacctttagataattatgcttctctgcagctccctgagaaggatacatggggcgttttaatgactaaggatgatcctctagcaaaaaagagtgctattacagctgaagatttagttggacgaaacgtcttaaattcacaacaagccgaaaatcgaaagtactttgattcatggttcggtaattataaagagcaaattaatatcatcggtactgttaacttgaatttcaacggtacacttttagttaaaaataaagcagctattatgctcacactcgataagctagccaatatatcagatgaatccaatctaacttttagaccaattactccaatgttaaaacagccggtaacagtaatttggaagcgagaaaccaataaatcacctgtagctgatttattcctaaatcgtttacgagcatcaattgatgacgattaacaaaaataacctagatcgaattgatctaggttattttttactttatttctttttacgactaaaacgttgcttcaatcgttgccataagcttaatgccctgcgcatatgatcagctggtacatattttcttattgctcgcaatacctttttggaatcacgtgccgcaaaaacaaatttaccatttgacttagttctgatttcaaaacgcggaatataacgtccaccaaagcggacatctgcaaccacataagttacttcattccaaggaatctgaacataatcttcaacgtttcgttcgttataaaattcaaaagctctatcgccgatcatgattttgccgtatgatgcaattcctctaaaccaggttgcatcaacagtgagatcgacttttgtattaattgacttagccatttattaaagaatgccccatacgtggaagagaacaccgacaacgaagataccgatgataatccagattggtgaaactttcttcttcaataaccacatacagaagaaagttaagagcaaaccagctaaaccaggaattaattggttcaagttgtcttgtaaagtagtaactttagtactgcttaaagctttaccgttacccatatcccattgttgaagagcggattggatacctttagcacctgatggaagcttgtcccattcgatgtaaccacccttttgaataggagtttgagaaacaattggagtgaacttgatgtttacccaacgttcaattaaggcacccaagacgaacatacccatcattgaagcaccacgggtaaccttttgaagcataccacctgacatatcactggtgatagctgaaccagccttgtaaccaaattcttgtgtgtaccataagaatgcgattctgataatattccagataacgaagaacaagataggacccattacgttacctgcaatggccattgatgcacctaatgcaccaacaattggacgaacagtgtaccagaatacagggtcaccaacaccggccaaaggtcccatcataccaaccttaacaccttggatagcgtcatcagtaacttctgcaccgttagccttatcttcttccaaagccaaggtaacaccaagaacaggtgatgctaagtatgggtgagtgttaaaaaatactaagtgtctttgtaaggcagcagataaatctttcttgtttgggtataactttctcaatgctggaatcattgaataagcgtaaccaccgttttgcattctttcatagttccatgaaccctgaaggaattgtgagtgccacataacgttaaaacggtcgcgcttggttaatttagttttcttatcagccattatataaatcctcctctatgcgttcattttaatagtcatcaatgatatcgccgagtggatcgccagtgccggcatcgccagaattattgtttccaccgttgccacccttagcttcaagagctaagtacatcaaagccattgaaaggccaatagcaccaagggcgatcaaagttaagtctttgatagcagcaagggcaaaaccaattgcgaagaatggccatacttccttacttgccatcatgttaataaccatagcgtaacctacggctacaaccatcgcaccaccgatagtcataccttcgtttaaccattgtggcatcattgcaagccaacttctaacagtacctgaagggattgctaaaagaagtgcagctgggatagcaattctcaaaccttgtaaacatacggcaatccattgccataagttgatcatacgccagttacccttcttagcttctgcgtccatgatgtgaacgatagcagttgaaatagtacgtacgatcatagttaagaacaaaccagcaacagctaatgggatagcgataccagtagcagtaccaatacccttaataccttgaccaccttcgatcaagataatagctgaagctactgatgctaaggcagcatctggtgcaacagcggcaccaatgttagcccaacctaaagcgatcatttgtaatgaaccacctaaggcaacacctaaatccaagtgaccggttactaaaccgatcaaagtacaagcaactaatggttggtggaattgccattcatccaagataccttccataccggcaagaaaggcaacaaacacaaccaaaatcatttgaatagcgttcatttatttactcctaattatttattactttttttcgtcaagtaaagtttgagccttcttcaagatagcatccatattacctggagcatctgaaggaacttttcttacatcaaacttaacgcccatcttttcaagttcacggaatgtatcaacgtctttttgattcattgataatacgttgttggcgttaacatcgccttccttatatgacattgaaccaacgttgatattcttaagatcaataccgcctttgatagccctcaatacatcttctggattttcaaacaaaagaagtgcatgagtgtttccaaatcttggatctttagcaatttcttgcatcttcttgagtggaacagtatgagccttaacacctgctggtgcagcttcacgaatcatactcttacgtaaatcatccttagctacactatctgaaacaacaattactctatcaggcttcatagctggaatccaaccagttgccacttgaccgtgaagcaaacgtgaatcaattcttgccaaaacgtacttgatatgaccatcaccaataacagtaccttctggaatgctcttcttactgcccttagcagcagctttgtcagctactggagctgcagcagccgtcttaggcattaagtcagctggcttagtcttaattccatctctaccaggttgaacaactgcagtggcgatgtgctttgcagttgcattagcatccatcattctctcagtcaatgcttgtacaaccattggtaaattcataccagcaacaattgcccatttatcatgcttttcagcaagtccatttgcttggttaaatggagtaccaccccataagtcaaccaagaacaaaacttcatcttggttatcaaatgaagcaattgctttttccattttgccacgaatgtcatctggaccttcatcaggctttaagataacatgtgcaaaattatcttgttcaccgaaaagcatttgtgcagattgtgcaataccatcggcaaagccaccatggctggctaaaacaattcctaccatgtaatttcctcctctagatcaaaaaatgaatccgcttttattatacgataaatatagactttaaaaaagtgttttttgaaaataatttcataaagtgccaatttgtttcaagcagtccaaatgccttgtctcccaagcaaagacagaaattagtctaataaaaaaagaaagcctgttttcatgatttgagtcgtttttcacaaatttggcttcctattaaaatatatgctggttggataatttcattttcataaaataacaaaaaaggaagccttccgcttccttctcccctttactccggctgtcagactcgaactgacgacatcttgattaacagtcaagcgctctaccaactgagctaagccggaatattaaaaaagagcacggcagcttcctttcctcgcaggcagttgcccaccaactactttcggcgttaagaagcttaacttctgtgttcggcatgggaacaggtgtatccttcttgctttcgccaccgtactcttttgagcttttacactcaaaactaaacataatccttctcgcaaaaaaccttccagtttgcttcgctttggtcaagtcctcgactgattagtactggtccgctccatccttcacaggacttccactcccagcctatctacctcatcgtctctgaggtgtcttactgcttacgcaaaggaaatctcatcttgaggggggcttcgcacttagatgctttcagcgcttatcccttccgcacatagctacccagcgatgctcctggcggaacaactggtacaccagcggtgcgtccatcccggtcctctcgtactaaggacagctcctctcaaatttcctacgcccacgacggatagggaccgaactgtctcacgacgttctgaacccagctcgcgtgccgctttaatgggcgaacagcccaacccttgggaccgacttcagccccaggatgcgacgagccgacatcgaggtgccaaacctccccgtcgatgtgaactcttgggggagataagcctgttatccccagggtagcttttatccgttgagtgatggcccttccatacggtaccaccagatcactaagtcctagtttcctacctgctcgagttgtctctctcgcagtcaagctcccttatacctttacactctgcgaatgatttccaaccattctgagggaacctttgagcgcctccgttacactttaggaggcgaccgccccagtcaaactgcccacctgacactgtccctggcctggcttacaggtcgaggttagagcatccttcaaacaagggtagtatcccaacattgcctccaataagactagcgtcctatcttctctggctcctacctatcctgtacatgtttaaaagatactcaatatcaagctacagtgaagctccatggggtctttccgtcctgtcgcgggtaacccgcatcttcacgggtattataatttcaccgagtctctcgttgagacagtgcccaaatcattacacctttcgtgcaggtcggaacttacccgacaaggaatttcgctaccttaggaccgttatagttacggccgccgtttactggggcttcaattcaaaccttcgcttacgctaagctctcctcttaaccttccagcaccgggcaggtgtcagcctctatacgtcatcttacgattttgcagagacctgtgtttttgataaacagttgtttgggcctattcactgcggctaaccaatctcttggctagcaccccttcttccgaagttacggggtcattttgccgagttccttaacgagagttctctcgctcaccttagtgttctccactcgactacctgtgtcggtttgcggtacgggtatgtcatctctggctagaagcttttcttggcagtgtgattaccacaccttcgctacttttaattcactcctcttcacaactcgtgttgctggttagaagcatttgactcttaaccgcacttgttgcttgaacatcgttccatcgcgatgcgtgcttcacctcctgcgtccctccttcgctcttaacgatttgacacagtacaggaatctctacctgttatccatcgactacgcctctcggccttgccttaggtcccgacttaccctgggcggacgagcctgccccaggaaaccttagtctttcggcggataggattctcacctatctttcgctactcataccggcattctcacttctaagcgctccattgatcctctcgattcaacttctccgctcttagaacgctctcctaccacgtgctctttaaaacacatccacagtttcggtactatgcttagccccggtaaattttcggcgcagcgccactcgactagtgagctattacgcactctttgaatgatggctgcttctgagccaacgtcctagttgtctacgcaactccacatccttttccacttagcatagatttggggaccttaactggtgatctgggctgtttccctttcgactacggatcttatcactcgcagtctgactcccgtgtatggatatctggaattcgtagtttatctggattcagtaacccctgacgggcccctagtccaaacagagctctacctccattatcctctccacgaggctagccctaaagctatttcggagagaaccagctatctccaagttcgtttggaatttcaccgctacccacaactcatccccgcaatttttaacttacgtgggttcggccctccagtgcgttttaccacaccttcagcctggtcatgggtaggtcacttggtttcgggtctacgtcacctaacttttcgccctattaagactcgctttcgctccggctccgtcttttctgacttaacctcgctagataacgtaactcgccggttcattctacaaaaggcacgccattgcactttaatgtgctttgactacttgtagacacacggtttcaggttctttttcactccccttccggggttcttttcacctttccctcacggtactggttcactatcggtcactaactagtatttagccttgcgagatggtcctcgcggtttcaaccgggattcctcgtgtcccggcctactcaggattctgctaggcgtgcttgagatttcgcttacggggctctcaccctctctggcttaccttcccagataattcaactatctcttacactgccacgtcgcagtcctacaaccccaaatgataaatcacttggtttgggctctttcctcttcgctcgccgctactaaggaaatcgatctttctttctcttcctgcagctacttagatgtttcagttcactgcgtcttcctttgattagctatctattcactaatcaataatgcatctctgcattgggttcccccattcggatatctccggatcactgcgtacttaccgctccccgaagcttttcgtagttcgtcacgtccttcttcggctgttagtgcctaggcattcaccgtgcgcccttttctacttgaccttactcaagaattctcttctcggtcgctctacaatctgttctctttgattgtctcggttttttgcttggattatattcagttttcaatgtactagctctttttgaggtactaccctcaaaactaaacaaagtttctcagtgtgcttccgcttgctctggatacttctcttagcattcctgctctccatatccttcgcttccttagaaaggaggtgatccagccgcaggttctcctacggctaccttgttacgacttcaccccagtcatctgccctgccttagacggctccttcccgaaggttaggccaccggctttgggcattgcagactcccatggtgtgacgggcggtgtgtacaaggcccgggaacgtattcaccgcggcgtgctgatccgcgattactagcgattccagcttcgtgcagtcgagttgcagactgcagtccgaactgagaacagctttcagagattcgcttgccttcgcaggctcgcttctcgttgtactgcccattgtagcacgtgtgtagcccaggtcataaggggcatgatgacttgacgtcatccccaccttcctccggtttgtcaccggcagtctcattagagtgcccaacttaatgctggcaactaataacaagggttgcgctcgttgcgggacttaacccaacatctcacgacacgagctgacgacagccatgcaccacctgtcttagcgtccccgaagggaactttgtatctctacaaatggcactagatgtcaagacctggtaaggttcttcgcgttgcttcgaattaaaccacatgctccaccgcttgtgcgggcccccgtcaattcctttgagtttcaaccttgcggtcgtactccccaggcggagtgcttaatgcgttagctgcagcactgagaggcggaaacctcccaacacttagcactcatcgtttacggcatggactaccagggtatctaatcctgttcgctgcccatgctttcgagcctcagcgtcagttgcagaccagagagccgccttcgccactggtgttcttccatatatctacgcattccaccgctacacatggagttccactctcctcttctgcactcaagaaaaacagtttccgatgcagttcctcggttaagccgagggctttcacatcagacttattcttccgcctgcgctcgctttacgcccaataaatccggacaacgcttgccacctacgtattaccgcggctgctggcacgtagttagccgtgactttctggttgattaccgtcaaataaaggccagttactacctctatccttcttcaccaacaacagagctttacgatccgaaaaccttcttcactcacgcggcgttgctccatcagacttgcgtccattgtggaagattccctactgctgcctcccgtaggagtttgggccgtgtctcagtcccaatgtggccgatcagtctctcaactcggctatgcatcatcgccttggtaagcctttaccttaccaactagctaatgcaccgcggggccatcccatagcgacagcttacgccgccttttaaaagctgatcatgcgatctgctttcttatccggtattagcacctgtttccaagtggtatcccagactatggggcaggttccccacgtgttactcacccatccgccgctcgctttcctaacgtcattaccgaagtaaatctgttagttccgctcgctcgacttgcatgtattaggcacgccgccagcgttcgtcctgagccaggatcaaactctcattttaaaaagtttgaatgattgctcattccttatttaagatctttgtctcaaatttattgctcgcgaattgacttcgcttcttgtttgggtttttacacccgcacacttttagcgaaactttgttcagttttcaaagtactacctctgtcttgcttttttgcaaagcagacagctttcatattttatcaaaccatcatttctttgtcaagaacttttttgatttgttttttcgtcttactcaagctttttctgctttcacctgacgacatttaaatatattaccagcttatttacttctttgcaagtactttttttctttttatttgttttctttccttgcatgtctgtttttaagctctcgtcgcatctctcgaagcgactttattaatttaccttattttctccgctttggcaagtcttgctcttcgttcgcaatcttttagaaacgcttggacgcgctgtaattatttctttatttctatttcaatctacctttttctttttgcttactttatttttatccttacgcttattattcgagttttactgttttttctcttaattttagtacaaaatttttcgaaattttttcaaaataattcaaaaaacagtgttttgcctaatttttcactcaaaaatgcaaaaaaagacgtttatcaaattgatatagtcctactttagtagacagtacaaatatataaaattgtactatctatgaaagcaggactttttgtatgtctagaaaaagtaaatttagctatgaagctaagcttaaagcagttaaacaatacataagtggcgaagcatcacctgcttcaattgcgaaagttttaggggctggcaagactacactgcgccaatgggtatatgcatttaaagatcatgggccagaagcattaagaccacataaatataatcaaagatacagtaaagattttaaactcaaatgcatagctgcctatttaaatggcgaaggctcatatgattatctaacaaataagtttggtttgcgaagtgctgcacagttaaagcagtgggttatcaagtataatagtcatcaagaactcaaggactacaatcctattctggaggcttatatgactaagagaaaaaagacaaccctagaagaacgtaaacagatagtgaaatactgcaaggatcatcaatggaactacaaggaagcagctcttaaatttggctgcagctatgcccaagtatacaactggtcaaaaaaatacagcgcaaagggaactgacggcttagcagataggcgcggtcatcgtttaaaagaagctgagctatctgaaactcaaaggctaaagcgtgaaattgaacagcttaaaaaagaaaatgatattaaagaccaagagatagccttcctaaaaaaagtgaaggaattagaaaggatgtgtttgctggacagccaaaacaaagacaaatagcacttaaacaacagcagcgaaattctctttacagtttgatcaaagaatgtcaccgagaatataagtggtcaattgaatggatgtgcaaacaagccaatattgcccggtcagcctactacaaatggcttaatcataagccaagcaaacgtgaactaagagatcaaaagattcttaagcgtattaaagaaatagctgagagcaataacagcctctttggttctcctaagatgactttggctttaaacaatgagctagcagacggtgaggccaaaatataccgtagaactgtggctcgcttgatgtgcgtgaatggcatctatactagcaaggccagatttaataagaggtatcgctatcaagctgctagaccggaagaaactgccgaaaatctattgcatagagacttcaatgccactaaacccaatgaaaaatggtgcactgacattactgaagaaaaaattcctggaacaagtcaaaagatttatctctgtactatctttgatctatatgatcgtttccctgttggctatgctttaagcaagcgcaatgatacagccctagttaacgctgctctgtcaactgcttggaaaagagagcccaatagtcatgcaatgcttcatagtgatcgaggatttcaatttaccaggatgccttttaagcatgagctagaagaacatggcatgccacaatcaatgtctagaattggccgctgtattgataatggcccaatggaaggctggcaaggtttaattaaagaaatgcgagaagttctttatccgaaggcaaatagctatgaagagatggaaaaagcctttaaagcaagtattgaatactatacgcgtggtgctagttaaatcgttctagacaatatgtcatattataagctaaaatagctatttctagccgttgttgaaaacctactaagctcctggctcgattattctcagcattgtaatagctaagcaaagaaaagtcgctttcgattgttcttctaattgccattaactgatgatcattatgctttttagcacccctcatgtttttacgatatggtgtccaaagcacgtatcccatacgctttagcttggctgctaagtcttttcctaaatagccttcatctcctaaaagataatggttaattggatgagcattgatcatcaattctaccgtctcttttgcatcatgtaccgacgccttagtaactgcgtagtcaagcagatagccatcatcactcactattgcgtggactttgaagccataatagtagatttttttcgtcgctttataaccaatatcggctatgccacggaagatcttaacgtgataattgcgaacaggctgacaaactggaatcggaaaactgtcgataatcaataattctccacctacctttacttcctgattccaaccctgacggatacaacgaattagaggcaagagcattcgagctcgacggttaaaacgagaatgagataagccaacgaagaatttacagaatcttcgttgagattcaattccaatttcagtttgccaaatgagcatcgctaagatagaactatcaggaagcttggtctgatcaacatttttacgatgtttaagtccatcaggcgcataaagcttatacagcgagcgacaaatcacatttaaccgattaaaactaacttgtaaatggtgagaaaaacgattaagcttgagatagttcaattagatcagactcttttctatttaaattacttacaacttgagtctagtctaattggacttttttattaactaaaacgatttaactagcaccacgcgtaatactatattaattatgatcctcaggagcgcttcaatggcaagagcgcaggtcaggttagaaaagaagctaagaataatccagagaatataatttcatatccaataaaacaagataaaagatataaagacttttggaaaaagattgatgaaaagaaaaatcagctcgcacaatagcgaactgattaatcaaattaatttatatatttaagctgtctacttgacacggtacggatcaaatataatcattcgataaacgtctcattttatatctttagatgatcaatctttagtgtctattcatcttttttcttacgtttttcaacgccaagtaaactaatccaacctaaaccagcgagtaatgtaccaatcaaacctagtgtgtgtttgtgttcactaccagtttgaggcaataaatcttgcacggacttcggttttgcatttaatttgttagctaattgctttctttctgttttccctattgtcctcttgccagattcaatgtctgctgccttaactgggccgttagcgcgtttctttcgacctgtaggcataccttcatgcttaggattgttattagagtcatagcccttcttatttgctttagaatgattatgcttcttttcactttccttatttggctttgccggtttatctggcttcggctctggatttggttttggcttcggttgaggttctggttccggagtaggtacttcatcttgcttgtaagtaattttaatattactgtcagccgtatctactgaaaccttttccgctgccaccttactttgtgaagcagtgtagccactaaatgttggagcagtatatgcatcccactgagtattaccatctaccctccactcactgtatgtaactttgccagtaactttatcaaacgttactttttgcgtggtaatcagcttaccacctgaaggcgtaatgactgtaattattctagttggagtcttagtaaaagtatccaagtgatcatagttcttacttggatcaccttgcactgggcctgttggaacatcccttggtggagtttctggagtaacgataatggtgtcgtgttcaacccttacagttacagttggaatgccatcagcagttgcaactactgtcttagaaatatcctgtcctgaaacaatcttccatcctgctagagcttgtggatttacatctactgtttcactggtcttgccactaagcggagtttgccctacttctttgccatcactatcaacgtaagaaatcttccccgtttgagtgttgacagtataagtagcagtgacttcactattggcaaccagctttccagtaaccaagtcatatacggcagtccgcgtaaattcaacggtctgtttcttttgatcttctgaaatctgagctagttggcaattcttgatctggtgctaactcgtagttctctggaagcttcaaatcaaggttatcaacagttgagccagcaacgccagacttagtaattgtctgaccaacttgcttgttaccttcttgagtatcttcaaattcaatagttaaagttgcatccaaagtaaacttagcctttgaagaaatattcagcttgtagtttggatttgctttttcaagggcagtaatactttctggagttaagttaattacataaacgccagattcagctggaattccatttgcaaattcataagtcaaacctgccggaactgtaatagcagttggaacattaactttaaagtttgttccatcaattactggtacagtgctttcttgactaccagaaatcgttacattttcttcagctggactaattacataagtgaattgaccactttcagaaactgcatagttaggattatcatcttgcaatttcttcaatcccttagcagttaaggcaatgtagtaagtaccggcatttgttggcgcagaaattggcttaccattggcatcgacccattcataatcaccagctgctaggttagcagtattcaacatttcaccgcttactaaaccagttggagtgaatacaccgaagttggtagcttgagtgttaatcgttgcaggttgaccatcgtacgtcttgccatctgcgcccttactattaccgtcaagaactacattaagatccttttgtttaattgtgtaagtggcagagcctagcaggtcttcagcatccaaggtgacatttccttgaccagcgtattggttaagggctttttgcaagttaacaataccattggcactcagcttaatcgtgtaagtaccatcattaactggtgcgctgccagcattccaaatataatcaccgtcttgcagagcatacgtactttcggtagttgaacctgggaaagtaaagtgaactaaaatttgaccattgctgttaacttgtgcagttgttacagctgtaccatcaaatgtcttttggttagagccattaagttttgcgtcagcagtggctgcagtaactatgtagttagctgttgtcttaaatgtccacttgtagttagcaccattattaccagttagttgcttaagcttttcttgaccagcctgtgacaatttaacttggtaagtaccgacattcgttgcattaccaacaatttgcaaatcgtcagcagttaacttaagtgtctgagcttcaccatcagcggagtaaaccgtcgcatcgtaggttacgttgtacttattcaagttaagtccacttggtaaggtttgcttagcatcataagtcttgctgtcaccactattcagggtaacagtagcttcgccctggttaatgtacccttagtagttacatcagctgctacttgtgggtatgcgtagttagtacccaaagctttttcaatgttagccaacccttgcgcagataattccacgtggtattcaccgacattgcctggggtttgatcaaagatcaagtcaccatctttagcagtgtagcttaaattagtactattagtactatttttaccatacgtatatttacaacaacataatctttgcctggatcaggaacattaacttgccaagtttgtccagcttctttaggtagactccatgaaccagaaatcactttaaatcctggcgttgttgaatcacctgctgtttgatcccattgccaattaccataagtaatcgtgttattagcaacatttaaactaccagtctgggcatagaatacctgtatttgtgaatcaggtgcaaattgttgaccatttttgtcaccaccagcaattacatatttagccgttactgttctcgcttgctgttttactggaatatacaaaacagtgtgaactggacgggcttcataaactgaggcgttctcagtatatgctagaaactccttaccctcactagatgtatcttccttattccaagttgggtaaacaaattggtttgctgacctggatcgccgctcttattgtaagcactataagaaacttccttattattttgagtagaaacatctttagtatcttctagactagtagcttttttatcttctgcctgtttagttgaattctgctcggttgaatttttgctagtcaaaggatcggtaccgctaacttctttttgagcagtagtatcgttatcattcttaccagctgtcgtagtctgatcatttccagtatctgtggtagtcttcttagccgactcaacctcttctgtttctactggatccgtagtatccgcatgaaccgtttgacttgtattcatcgtccaaagcaaagttgaaagcaaaacggaacaaactccaatgttcaattttctaatactaaagcgctgcttgccttcaaagtcatttttatttagtctttctattacgcggttttattctattcatctattttaacgcctaacataaatcacaacaaaaagcaggcttaaattatatgcaaaaaaatcgttattttaagttgtcagtcacaacaactaaaataacgattttgcttttttaatctttaattacttaaattaaacctgattccttagtaatcttcttcataccattcatgtaaggaacaagtacatcaggaacagttactgaaccatcttcgttttggtaattttccaaaatagcagctacacaacgaccaacagccaaacctgagccatttaaagtgtgtgccaagtgaagcttgccgtcttcatcacggtaacgaatttgtgcacggcgagcttggaagtcagtacagtttgaacaacttgagatttcacggtacttgtcttgtgcaggcatccaaacttcaaggtcgtaagtcttagcactagtaaaacttgcatccccagttgaaagagcaactacgtgatatggcaagcccaacttttgcaataagtgttccgcattatgagttaacttctcgagttcatcccatgattcgtcaggcttacataccttaaccatctcaaccttacggaattcgtgcattctgatcaaaccacgagtgtcccgtcctgctgaacctgcttcacttctgaatgctggtgacaatgcagtaacattgattggcaacttgttttcatgaataatttcatttctgaagtagtttaccaatggaacttcagcagttgggatcaaagttaagtcacgtggcttatctggatcgtcattatcaacgatggtataaacatcttcgtggaacttagggaattgaccagttccttgcattgatgcatcgtttaccaagtatggtgggataatttcggtataaccttccttagtgttttcatcaaggaagaagttgaagacagcacgttccaaaagcgcaccagcaccgatgtagtaaacaaaacgtgcacctgaaacctttgaagcacggtcccagtctaagatgccaaggtcagtaccaatatcccagtgagcctttggcttaaagttaaattcagtagttgggtgccacttacgaacttcttcgttgtagctatcgtccggaccaattgggtctgaatcagctgggaagttaggcaatctaagcaagatgtagttttgcttttcagttaattccgcaacttccttatctaagtctttgatttccttacctacttcacgcatagcagcaattgcatcgctagcatcttctttgttacgctttttttctgcaatttgcttagaaacgtcgttacgcttagcctttaattgttcactcttagtcaaatccttacgacgcttagtgtcgatttcaactaattcatccaattcttctggcttaatgccacgcgtagccaatttcttctttgaccagtcaagattctcacgaatcaccttaatatcaagcatataaaacctccatgatatgcataaaaaaagagccgacttatccctacacttgggacgaatcggctcttacacggtttcgcggtaccacccagcttcagtctatctagactgcacctctttaccagacgagtaacgacgtcaaaccgtgcaactattaattgcccacattattgaaatctggaagcgactatgcattcactcgcaccaaccgtgaactctctgaagcagtcttaggatttcgtgtttgcatttattttaagccattcttcttttttgagcaaataatatttttctttaaacgaaaaaagtgcactaacttgtgtgtaatcgacagtataaacatactgaaatcctagtgttttaagcaatttctgtgatttttcattatcggcaaaagttccagcccagacttctacttgctttttctttttaaaagcataggtcaaaatcaatcgtaaagcttcagtcatatagccgtgaccttcaaacgactgatctagcaaaaagccaacttctttagtctttaataggccactcttttcatctaagccgcgttcatacaattcaaccagaccgatcacttcattgttcttgcgcaagcaaacgacataactttcaggacgcgacatatattgcttcacgccattaaccgcctcagtcagattgcggtattcctcaaagccagccatcttgtggtagcggggattgccaccccacttcagtaattgctgcgcgtccctttcttcaaaaggtctcaaatatattctcttagattcaagcattagttacccatcagcttcaagagccactttgcaccaaactgtaggcctatactataggccgcaattgtccatggcttacacaaaataataatccaaaaataagtccaaaacttcattttagtcaatcctgctagcaggcaaagcacgtcatcgggagctgctggggcgagaatacataatgcaaagaaccaattaaatttattctgattctctgtccacttcatatatttatcaagcgtttcttccgaaacaatatgcaaaataaagggccggccgtagtgtctagctaaaaagaagttgataattgagccaatacaaatccccacgtagttataaataaacccagcaactgggccaaagaagaccacgcctcctaataaagacacgcccccaggaataatcggaataactacctgaacaatttgaatcaacacgaaaataatcggaccaacaatttgtttattagccagataagcccgcattttagcttgatcggtaaagatccccaagcggtaccaataaatcaccagcaacacgattgcgactccacaaactatagttgcaatattgattaatttacgactagccttagtcgatagatgcattttctcgccttccttcatcgcctagtagttcaattttaacaaaaatccagcccagataccgtaaacatgcaaatctaaaaaaagttttattattttagctactttgggcagatactatataataaagttaataagttattagaaaggtaggcatcttatggttgtaattaagaatgatattgtttatgacaagactaaagaattaaaaacggatatttactatcctaatgatacatcttctaataccaagattttaatcttctggcatggcggtggctggtttagaggtgataaagacagcgtcaaaaatctaggtattcgctttgctaatgcgggctttatgaccttcatccccgactactccttagcacctaaataccactttcctgctgctcatgaagatgcattgcactttgtcgactggctgttgaattctgaatacactgatcaagacgatatcaaaaacattgttcaaattggagccagcgttggcggtgaaatggcaattgaggttgctgggaaatacggtttccctactgtcacctggtctgctccagttgaatattcaaactggattaaagatcatcaagatactaaagcatccccagatgccgctaacgattttggcattaccgatcctgaaaagatcagacaatctttctacaagcacttcacattaacctacacaggtactgaagatgaggctgtattacaaaaattagacgctaagtcatttgactatagccatctcaagcaattaatgatgattaattccgcagatgagttgacaccactagctacagtattggattttgttaagttcttagctgacaaaaacttaggcgtacagctcctcgtaattcctggtcacggtcacgccatggcctatggtcccgattatgtagacgaatcgctcgattttttatatcaaactattaagagacaaaattaagtatgattaacatccaaaaattcgttcaagtcagaaaaaaactaaagttatcacaaactgagctttgccaaggcatttgtacccagtcgaccttaagtaagtttgaaaataatgggcaagtgccttcatttaaaattctcaagcagctttgtgaacggatggatattgatgttagcgatattatggacagcagtgagcacaaatatatcgcgcatatcctgtttgaagcggattttgcttttatcaattttgattacagtaaaatttttactttactttcacaaatcaaccccgaagtagacctaaaacgccaaacaaatcggattcattatcactatttgcgcggacaatatgctctaagaagtgatcgcaatcaaatgcaatgtcattaagttaagacattgacaattaagggtgcttttttagagatcgaatcatttggattcgatctctttttttgtataaaataaaggcgaaaagaccagccttttcgcctatcttatatattatatattttaaaccttcaaaattattgccagaaagatggtgttaattatgaaagcccttcataagaatattctagaacgtcttgatcaaattatcaataatactggggatcatattcacgattttattaataatcctcatgcttttaccaggaaacgcactttagatgcagcgacagtccttaaaactacaattaacatgcaaggtcagaatttaaacagtgaactctttagagcttttggcgaagatgcaactaaaaagaacgataaagtagttagtacttctgcctatgttcaacgcaaaagccagctttctcctgcttgttttaaacatattctgactgtttttaatcaaaatctatttaatattcaactttttgatcatcactaccgtttgtttgccattgatggctctgactttaatcaaatctggaatccgaaatcgaataacattgtacaagcttcttctcataaaaagaaaccctattgtcaaattcacgttaatgccttatatgatctattgaataatacctaccaggattgtatttttcagcctaaatcagaaatggatgaacgcaaagcggctgttcaaatgcttaaagctttgaattgtggtccatatattgtaacaatggatcgtggctacactagtttcaatatgattgaaaactgcaatcgcctgcctaactgtcattacataatacgaactaaggctggacaaggcggagttaaagaaataacgacattgcctgatcaagaatgtgatcgtgagatttcctgcctggtaactacttctaactattactacatcacgcataaagccagtgagaatattcaccatgtccagcatcattatcgccaatatattaagtatcgctctaaaaatacccaggatctaagctgggattttggcgagttatgcacaataaaatttcgagcctgcaaatttagaattaatgatgccaaatcaggcaaagaagaatgggaagttgtgctaaccaatcttgatcgaaaaaattatccgctaaaaagaattaaagagctttatcatctgcgttggggtattgagacctccttcaagaaattgaagtattctttaggcagtgtacagttccattccaaacaagataaatttattgaaatggaaatttatgcccatatgattatgtttaatgcaatcagtcaaattgatgcacaggcctatattccgcaaaagcattgcaagtatcaatatgccatcaatttcaagcaatcatgcttgattattcagagcatgtatttggcttcttctttaacgcaagattttgaacggatccttattcagatcagctattataccattccaattagaccaggccgcaaggacaagagaaatattaagcccaaatcagctgtatattatttatatcgcgtagcttaaaaaagcagaatctgtgctatgccttatttgttgtacgaaaaaagcaccaatttaaccaattaaatgttaaatcagtgctttaaaagtctaatattaattgtcaatgtcttaacttaatgacattgcaatcaaatgagtgcgctcttttatttcaacaatatcttgaccacccaggaattgcctgaaaatgatatttaccgcttgttggcattaaatggttgtagtcaaatctatgctaaacaaggtgaaacagagaaagccgagcactattatagtcaagtattaaagaacattatggacgtcaagatcgataatattttgactacaatgcatgccttaagtattttatgtgatgccggtgaattctatggcgaacgaaaaatgtatcgtgagtctaatgcattattgcgctatgcctataagattggcgctgagaagcacgtgattttttacatggcacgcatcctattgcggcaaggcatgaatgatattgatcagtcaaaaaagaaagcaattgctatccaacatttgcacgatgcctgtgcttttgcccgaatcaaccgcaacacgattacgctaaatcaggctaaaaaattactaaaaaaattaaatgactaagatccaatttgaaatatagtaataagagtttgttcatttgattttgcaaaaatgataaaattagtataaatgaacgctgtttaggagtttcagataggttgactttggaacgaattatcaagtttatgtttgacagtattggtagctatttatccattcgaaaaattgccaatacgttaacttcaatgggacataaaatcacaccaaatacggtagaacggtatattaatgcgttactcgacagtttgattatctatgacgtttcacgattcgatattcatggaaaagagcagctaggttcgctaaaaaaaatattacattacgcgtggtgctagttaaatcgttctagacaataagccaaattataagctaaaattgcaatttccaaccggctttgaaagcctatcagactacgtgctcgattgttctcggcattgtaataggtcagaagcgaaaagtcgctttcaattgttctgcgaatagccatcaattgatgatcattgtgctttttagctcctgtcatatttttacgatatggtgtccaaagttcgtaacccatttgttttagctgttgatgcagttctttgcctaaatagccttcgtcgccaagaagatagtaattagatggatgggtattttctatcagttcaactgtctccctggcatcatgaactgatgcctttgttacgacataatcaagaatgtaaccgtcatcgctaacaatggcatgaactttgaaaccatagaagtaaattttcttggtggccttataaccaatgttggcataaccgcgaaaaattttagcacgatagtttcgaattggttggcaaacaggtaccggaaagctgtcaatgatcaagaactgtccattcaggtcaacctttttattcatttcttgccgtatctgataaatcaattgcaatagctgacgtgaacgccgattaaaacgtgagtgtgataaacaattgaaacattcacagaatcttctttgtgattcaattcctgtcttagcttgccagataagtaaagccaaaatcagactgtccgtagttttaatttgatcaatatttcgccgatgagtaaactcagccggtgcatacaaacgataccagtgccgacaaattatcactaaatctttaaaactaacttgtaaatggtggctaaaacgcttaagcttaaggcagttcaatcagatcagactcttttctattattactatttacaagtcgagtctaacaagattggacttttttattaactaaaacgatttaactagcaccacgcgtattacattgttgatactgggcttagatatcatttgttggcaaatcaaaaaaagatcgtggacatataattgaaaatattgtttatcttgagttgcttcgtcgtggatataacgttactgtaggtagcatccctaatggtgaaattgattttgtcgcaagaaagaataacgaaattttttattatcaagtgtccgaaacagtgctagatgaaaagaccttagagcgcgaattgaaaccgtttaacaagattaatgatcattatccaaaatttctattaacaatgaatgaatttggcaaaaatgataattttaacggaataaagcaacttaatattttagattggttattagaataattaagctaagattaagaataataatttaaaaaaagaattcgaaaaatccccatttgtagtgaaaatgcctacaaaatggggatttttttagataatcttgtaaccagtaactggcttagcaggtactgtattgaaatcaaagctagcaagtttgtccagttcagtattaccatcaataattgtagtaacaccttgagcaatcatcaggttcattactttatccttgtctagatccttagtgaaggttaccaagactacaggcttatgcaaagcacgcatgaaaccaatttcaaaagcactaccatcatctacattgtccatgtcatacaagaagacgccacatgtagagttaactagaccttccaggtcattgttataagtggcaaggcgccaagtcatgctgcgaatgccaccaatttcaggattcttttcatccggatcaacaaaattttgatcaaatggaaaatgcactctgaccactgtcggattttcttctaacaaggcacgagccttatcaactcgagcacgttgatcatcattgtaaaatggagtgcctaaataaaccttagcagttgaaacttgtttgttcatgcttttgtcccttcaatgtttaaaacttacaaaataaaattatttttcattttagcatgacttttttacaactaaaagcacaaatagctgtgttttcattgtaaacgctttataatagaaacataacttattaaagctaaacataaaacttattggaggaattattttgtctagatatcaatcaattaatccatatactaacgaagaatttgcaagctatgacaattctactgccgcacaaattgacgatgccattaacttagcacacgctttatataaaaaatggcgtcatgaaaatcctgagacccgcagtcgtcaattacacaagatagcagatgctttgcgcgagcatgaagatgacttagccaaaatgatgaccctggaaatgggaaagcttttgcgcgaatcaagagaagaagttgaattatgtgcttcaatttgtgattactatgccaaaaacggggtcaaaatgttggctcctactccaatcgaatcagacttaggcaatgcctattatttgaagcaatcaactggcgttattatggcttgtgaaccatggaatttcccactttatcaagttattcgggtcttcgctcctaactttatcgtgggcaacccaatcttactgaaacacgcccacaatgttccaggttctgctgctttaaccgctaaaatcatcagacgtgctggtgctcctgaaggcagcttaattaacctttatccaacctatgatcaattaagcgatattattgccgatcctagagttcaaggcgttgcattaactggttcagaacgtggcggttcagctgttgccgaagctgctggtaaaaatttaaagaaatcaaccatggagcttggcggcaatgacgcatttatcgttttagatgatgcagatccgcaagtattgcgtaacgttttaggcgatgctagaacttataacgatggccaggtatgtacttcatccaagagaattattgttgaaaaatctcattatgaggaagtgctacatacgcttaaaaacgtcttttctaatcttcaagcgggtgacccacttgaagccggtactaccttgccaccaatgaattccgaacgtgccaaggaaaaattagaagctcaggttaaaaaggccgttgacgcaggagccgagattttttaccaatatccagagattgattctaaaggtgccttcttcagacctgtaattttgactaacatcgacaaagaaaatcctatttatgatgaagaattatttggccctgtagcagaagtctttgtagttgacgatgatgacgatgccattcaacttgcaaatgattctagctatggcttaggttcatctgttatctctaacgatatcaaacgtgctcaaaacgtggccgctcaaattgaaactggtatgactgtcatcaatggccgctggattacctctggtgaattgccatttggtggcgtgaagaagtctggctacggtcgtgaattaagtgacttaggcatgatggcctttgttaacgaacacttagtaattgatgttactaagaataatcaatagtaatttttcgataaaagaaacatactaacctagtgttggatcatgaatcgacggattcacgatctggcactttttattttgtctaaaatagaaagtgaagataaagcaaatcaagtcttcagctttttagacacttgatgtcgtaaaagaaacggactgctttaccacctattcttaagtctcttcgaagtctgtgggcacttagatgccgtgtttagaaaattagaattaataggttgataaagaggtttatcttcacagcggaggttatattatggaatcacaaattattttcggtattgatgttagcagtaaatcttccacagtttgtgtggttaatgaccggatcaaacaaggcgaatcttttagaatctctaatgattcctttggctatcaaaaactttatgagcaactgaaccaatatttgataactcctttagttgttttcgaagctactggtgtttattctctaagcctgcaagctttcttagaggattatcatattaagtatttgaagcttaatccgcttaaagcgaaaaagctaatggacaataatttacgccataataaaactgataaggtagatgcttatcgcctggctttaattcaatttaatgccccgcaaaagttgcgtgatccacagcccagagagtatcatgaacttcagaatgccagtcgctattatgaagaacttactaggagtatagttactactaaaaatcaattgcaccgcaacctccaatccactttcccacaaattgaagaaatactgtctcatccatctggcagaatttattgggcgcttgttagtcttttcccacatgctggatatgttctagaaaagaatgagacacaggtaactcaaatgcttaattctatttctggaataggacaacaaagggcacggtacttaaccacaagattatacgcttttgctagagaagcttatccttatgattccaaagatagtattatcgttagagctattcaaaggaacatttctaatttgttttcactccagcaagaacgcgactatgtaattaactacatggaaaagctggctaaagcagtaaacgctcgtgctttatccatctatttgagtatcccaggggttgctagaattacagcagtgagattagtagcagagctcggtgatctaagacggtttagcacttcagctcaaattgatgcgtttgttggcattgatccaggaaggtaccaatctggtgaaaaagacagttctcttggcattaccaagcatggcaatcatattgccagaaaaatactttatcgagttattattcaaatggagacggtaaaggctacgcagccttgccatataactgattattatgacaagaaaaaacgatcttcaaatagccaaggctataagaaaatcgccattgcatcagtccataaactgatacgcacaatgtttgctcttatcaaacatgatcaattatatgattacaacatagccaccaaaaataaaagactttagctgaaatcaaataatcaacttaagtataagcaacctatggaaaaactacaagtattcataggcttatttgtggtactttcgctttttcttaaatttaaactcttatttgctttaaccttattcgcatcattaaaacaagtaaatttattttcttaaatcattgataatacttgactttgggtagaaaatacgctggcaacttaaccagcgtatttcttttacttattattaattctatttctttttaaaaagattatatccagccaaaatcgtggtcaacacgctagccaaaatcataaagtaagctgaagctccgagagaaactgcatatgacataagttgactcgtcaattgagccagcaccccagttgaagcatgtgccgcgcttgatatttgaaaaatcatataaatcaaaaagattgattcaatcaaagaaaggaagaaggccaaagtctgactagccttagtatttttcaaaatattataaataatgaaaattgggaacaagaatagtagcaaccagacaatgtaaagaataagtgcataccatgatgtcacgccagatgaaagcaagcgccctgctaaaccgaacagtacattggaaatagacattctctgcgtgtaagccgaggcacccgagtcggtaaagagaacgattagactaactaaagccgtaaaaataactgaaatctgcacataattaaagtgatgtttgcgaacattttttatttcacgtacatgattttcaatccgaggatatttttgcacaaattctcggtttttcgctttgactttactttcacgtgcatccacccggttaaagacatcggaaccaattcggtcaatcttttgcgttaatcgcttatcaaccgtatactgctcgatcttatctttacgatcacacacaatataaagccaaaccattagggctaaaaagccagtccaccctgccgctctagaaaaactcattaggattaaaagtaagactcccaataagaagactaaggtcgcatttttcctaacccacgcaatcattctttggacagtggtgttttgcttttcaggaataaattcttcccgataggctgcacggctgataatcttttcgccttcatctggttcttcaaactttgctttttggtgctgatctgtgaaaaagtcgtctcgatatttttttagattgaagccacagtttggacaaatatcatctgtttcactaattttatggccacaatttggacaagtagtcatataaaaattcccttctttttcaatctgttagtcattattataacatgtatcagaatttgaagatcaaaacaaaaaaagtgtctgggaaaaaactaagtctcagatcatgaaaaaagaacgttgaatttttgtttcaacgctctttttgtatacttttagctccagccttgatattattaaatcatcacaaaataaaaaaggtggaaactaacatgtacaagaattatatcacaggtcaaactgctttaacacttaatctagattttgccattccggccaatcatttggctaatgccatcagctggtttgtagattcaattccagaagatgttttagtaggcaagactgctaaaacgggccgcccagcctatcatccagccatgatgctcaaaatactgctttttgcttactccagaagagttttttctggcagaaagattgagttgatgctggaagaaaatctgccaatgatgatcttggctgaccagcaaaagatttcatatcatactatcaataattttagatcaagcagccatgccaatgaactgattaaaaagagctttatctacttcactaacctgttagaagatgaaggcttaatcaatgaaggtgctgcttttatcgatggtactaagattgaagctgatgctaaccgctatacatttgtctggcgcaaagcggttgaaaagtatcatgaaaagctgaaaggccaggcagttgaactttatgatgaattgattactaaagaagtagtcaaagaaatggaaaaagaaaaagttcaaactagtcaggggctaaaggaattagctcaagaaactgaagcagaaattaacaagctgactaaagagattgagcaggaaaacaaagccattcctggcggttcacctcgaaaagccaagcgacgtggactaaaaaagattctgcaccggctaagaaaagattatgtgccaagaatgcaaaaatatgaagaagccgaagagatctttgccggacgcaacagttattccaaaacagatcatgacgccacctttatgcatatgaaggaagaccacatgaaaaatggtcaattaaagcctggctacaatattcaagcagtcacgaccgatcaatatgtagttgattatgccatctttcctaatccgacagatttcaaaactttggagccggttttggatcaaatgaccgtgttggacaagtttgacaaaatcgtcgccgatgctggctatggcagtgaatacaattattcgatgctggaggaaaaatatccagacaagaagtactttattccctacactatgtatgaaaaagaacagaccaaaaagtataagaatgatccaactaagctaatcaactggtactacaatgaaaaagatgattattacattgatcatcatggcgtcagattcaatttcaaatattacagccagcgtaaggatcgttctactggtcaggtccgtgattttaaggtttatgaggcagacgagttccagctaacgccagaattggaacaattggctaaaacagctagcggccgccagcgccaagttcgctataatcctaactggcaatatttaaaagaaaaagcaaaagaagttctccaaagcgaagaaggcagacacatctatggcatgagaaaatatgatgtagagccagttttcggacatttgaagaacgtatttggcatgcgcagaacgcacctgcgaggtaaagagaaggtcgaaaccgatatcggaattgcctttatgatgatgaatttgaacaaatattgtcaaagaaggtggctgaagggccgatttttattgttaaaaattttaaagagaacaaaaaaacgatcaagattcttaaaaaaggaaatcttgatcgtttttattcatctggaagctagttttttcccagacacgaaaaaattatttactaactatttttcaacattaattggtaaaacattatcaatataaggtgaatgtccatcagcaatcaaatctgatatctttctcaacattggaaattgtatgttcctagtatcatttccaaacttttgatatgcttctggagttgcatctttatgtaataattcatatcctaatcttttgtagaaattaacactttcgtccacagattcaagataaatcagctgaacacctgtatacaatgcaatcaccatgcacatggaaaagaattccatcattagtgctctaccaattcctgttccttggtattccttgtcaattgcaaaataagcaaggtttatatatggtgtatcaactttataagtaccatcatccttcttaacattctgtgttaataaccctactgttgacgagaaaaaaccaactatctgatttttgataggatccattaatacaaaagtctttaatttctgtgtactttcgaacttcggacattccttacgaaaaaaattatctataccacgattagtggaatcaaaatgtagggctaactcttcaaaatgtggacacgtacttaacgggcataatttaaatgctctactttgattcatgcttttccttcccacgttgaattactatcccatcagcttcaacttctttttgcaacttttttatagacacacgtggtactggattggctattttgtttttgaattctttaaatgctttttcatttttaaatgttatctcagcatttctaacaatacctaccataattaccaactccttttagtgtacctattaatattatacaatcataatctgttttactattagtttcaagatttattttaacaaaaaaagaccgaatcattgcgattcggtcgaaaaactatttattaattatttttcttatttcttcttttggcgaacttattaaggtcaattccctcatatgtcaacttagtagctgctgacatagtaattggcaaaatgaagaccaagatgagcaaaccaatatccacggctaaggcaacttcaatcaaagttggaatacctgatggaatcaaggctgcaaaagtaccacccaagataattgcggctgatataacaaccgtaccaatgatagcacatgccttcaagattcttgaacttggagtagtgtatccttcagactcaagttcacgataacgagtcatcaggaagatactgtagtcaacacccaaagcgatcaacataatgaagctgaagaatggtgtgttccaagtaagcattgacttaccaagaactgctttaacaatccattgattgattgaaagtgagcagagataagcaataagtaaagtaccaagaatgtagactggttgcaataatgaacgagttacgaacatcaaggcaatgccgataccgattaacatgatggcagcagttctaaggaagtcgccactggcaactgtcttagtatcttcaatcttggaactttgaccacccatagctaccttagcattcttcaaagcagtaccttggaatgacttcttagccatagcacttaattcttgtgacttcttagtagcttcggttgcacttgggtttgaatcaaagacaacaataatttgagctgacttcttgtctgggctgaggtaaacatccattgacttcttgaacatatcgttcttcaagaattccttagggatgtagaaagtatcagcggcagctgatgaacctaaacctctgaggtaggtttcaccttgacctaaaccactattaacagtgtcaatacctgaagtcaattgtggaactttgcttgccaacttaccagcgccagcactgagttgtccagcacctgtgttaagttgactgatacctgaaataagttgtggagcttgaccagctaattggccgataccactgttaagctgaccggcaccatttgcaagtgtgccaagacctgtgttcaattgacccgcgccattgttaagtcggtttacacccgcaccaagacgactagcgcctgacgaaagtgaacctaagccactgcttaattgaccagcacctgaattaagtctttgtgcgcctgccacaccttgtgaagcagctgattgaacttgcgtcaagcctgagcttaattggttcaaagcagtagctgcacctggaagtgccttgttagaagcttgagctaatttagctacttgagtctggagagttgataattgttgaagtgatgaagttaaagcacctaattgtgagctaagtccagaaacatctatagcagcattacccgtttgagtatcagcttgtgtattactaaatgccttattaatagctgcttcagccttttgctggtcttcagtagttaagccagcactgccaatggcttgaagtgctgctcgttttgcttgtgcctgagcaccagcagctttttgactagctgctgacaattgtgctgcttgttcttgtaacttcttcaaacttgcagttaatcgtccaacttgtgaagtatctaatccactaacagcttgattcaattgttgaataccactgttaatttgtggcaaagcagtttgaagttgagcgagttgttgtttgtttgaaccactcaattgagttgaaagttgtgaactcaattgttgtaattggttaaccatttgttgggtaccactttgcaagctgctagcaccattctttaagcgatttgcaccgctaactaattggcttgcaccactttgaagtgcgtgagtaccacttgccaaacgaccagcacctgtttgtaaacgtactgcaccactttgtaattggcttgcaccattttgcaaacgactagtaccaccaactaattgttgggcaccactttgaagacgacccgtaccatcttgaagttgatctgcaccatccttcaaactattggcaccattagcaaccttgttggcacccttactcaatttgcccaaacctgaacgagcttgatcaacaccgtcgttaaccgtgtttaattgattgttgacataaagcatatcaattggttcgccgtaaggttctgtaacagatgtcgcaaatgaaacatcttttgaagcttgaagttgcttagtcacttgatcaattaacttcaaattttcttcattgtctaatctatgcttgctttgaatgtacaagtatgatggttcagccatccctttagagaagtgcttttgtactatcaacaaaccttgcttagatggaactgaatctgcaatttcatcagtgtcatcgtagttcaagtgacctgagtacattaacatgaatggcacaacaacaactgctaacacaaccaagtaaataattggatgcttcaatatggcagatgaaataccatgccataacttgtcatcactttcaccagtaaatttcttaactggccagaacattttcttaccaagcgtagccataaagaatgggttgagtgttaaaagcactaccaataaaacagcaacgccgaccgcaacaccaacagctgattggtaaacggagaatttagctaaacttaaagcagtaaaaccaattaagatggatgaacctgagtaaagaattgttttaccagcattgcgcaaagcgtcatgcatggccttatacttgtccatcccttttcctagattttctttaaacttgtcatacagcaaaatgttgtagtcggtaccgataccgaagagcacgataaccataaacacttgcgtaaagtttgaaaatgggaaattggcgcttttaactaaattagtaacaattgagaaggaagtaaggaatgaaacaccaactgtcaacaatgaaataagtggaacaattggtgacttaaatacgataaccaaaacaataaagataaagacaactgtaatggcttcagtcttcttaattccctcttgaattgaagcggagaaggcgtgctgcaagacatccgcacccgttacataagtacgaagcccttgcgttttcgcggccttgttcatttcgttataaactttttcaatcgtaccatgactcttagccacattaaattgtgctacccaagtcgtgccatcttttgattgaagtttctttcttgtagcaatattggaatctggaagtaatgaatccttgattccgtacttgcttttatcattagtgaacttatcaagcgtattattaatagcctgtttatcggcatcagttagcttgccactctttttgttaaaaacaagtgctactgcataagtgtttttctttttcgagccccaattgttctctattgactgtgccacattgctttgcacattacttggcaacgtaatgttagagtgatcattagtcagctgcgtaatgttaggcaaagcaacaacggaaataatcaatattaaaatccacgcaatcagttcaaaaacatggttcttcagaaatttctgcactttcctatttcctccctatttgttgtaaatcaggtactggttctacaagccgtaaaatcatttcatgataattacgattagattcatcttctgtttcatctccaaaagacttcgatttatccaaaaaaacgtaccctaatacggcgccaattaaagcatgaaatgaaatgacactttcttttttaaaattaagtctttcacccattttaattaaatccaagatttcttgattgatggccgcatcctttggatattcgttcaaatgatacagaatacttgataaagccggatcgcttaataaaaagtcgcgcacaacatccgcaaacttaagcaatgcatccctacctgacataccgattagatcgttcatcaactcatgacgtaagatcttaatctgtcttgcaccaactagtgatagcaattgtttgcgtcctgaaacgtaatgataaagcgactgtgagcggacatcgagcgccttagccaatgctggcaaagttgtagctgtcagtccttttttagaaattaattcagtagcttgatcaattattttatccagatcaagatttcttttctgtgccattttcatccctcctttgtcttagcatagtaaataatatacacctacagtgtgaagattacaatctacatagtgtaaataatttattttttctataaaaaaataatgaagccttctcggacttcatcatttccgttacttatgcttttttataaaccaagcattaaccgttttgcccaatttattaaaattcttgtgttgcgtgctccaaacagacatacagtaagcacgtccgttagtctgaacaattgcgacagcaaaatcatcatcaccaattgcataaatgccgccacttaagccagaaactaaacttggtcgctctttagctagggttgctaaaactcggctagcatattgccgatttaatacccgaccttgatacaagccaatcattgttttagctaaatcattagctgttgtctggccagtcatatttgagttgaccttagtttgagtggcacccatttttttagcaacttggtcaatattattaactccaatttttctagttaaggcactagctgcagttttgttacctttaagcattgcgctacgcaaataacttacaccataggtaataccaacttgaaacatcttatcacccttggctttgtcttttttgctaatcttaatcgcagttcgcgaccccatcttgcctttttgttcttgctcatacaaggcgatcagtaaaaataaccgcattgtttttcctgcgtcatgagccttattagtattaaaaactacggcaaagtgactagagttagttaaatcctgtgctactacctggaagctatcatcaatgcccataacttttttgatttgcttgactagcttctgattactgcctttttgagctttaacatggttagaatattcaatcgaattaaccttgggctccttaggcttttctaattttttaacctttggctccttggtcttctttttattcttagcgaccttgctgttatttggttcaacaatctttaactgcgcgttttccacccgctttatgtttgatgtatacaaaatgaatgcaaataaagtcacaattaaagaaccaattaatattttatgtttcattaaaacgcctcaattttagaagaaatgatgccttttcatcaaaatgactaaccaaaccattaaaacaaccatcaaaataatgattaaaacccagtcaaatgaattttttaaaattggtagactaacattcatcccataaaaaccggttaaaatagttggaatagttaataccaatgaccacacagttaagaattgcatggtatcattcaaattattgttcatcatattattactggtagctgataaagtcttagttacctgctgggaaatctgcaccatttctgcagactggcttgattcaatcaagacgtcatccaagcgttcactggcttctttagtgaagtctaatttgctgtgattcaggccatgcaacatgattaaatccgtctgaattgaacttgataaataaactaaacttttttcaatattcgaaagttccaccaaatctttattgttaatgtcatcagacaacttctgatctaggctgttacgttcaacgtcaagttgcgttacagcacgctggaagtattgtgatgaatataggaaaaagagcatcaacaactcagtaacatctttagcttcagacaaacgctcccgcatatgttcatcgttgaattcatcaaacacgtagctggttgattctgtatggaaagtaaagatattttcacccactactaaaaaagtgattgggtgtgaggtaaagtgcttaatcgtgttggtcggccaaattggcacatcgtaaacaagcaagtggctcttagtatggacgtcatagtcatagtgaggacgttcgtgacggtcagaaatataagagataatgtcaggcgtaaaattaaaatcctgctgcaatctctcactgtcttcttcacttaaattattgatgtcataccacttatactttgttcttaccggaaaattttgttgtctaatcaaccagctcacctcaacttttattttattacctagtaaatggtaccatttttctcaattctttttccacaaaaaaacagaccttacggtctgctctttgaaatctaattgctatttaattttattgcttccaagcagcatcaaatttttgcttaccagtattaatttggatgttagtattttgacccttttgggctgcagcaaagatattttgcaaaatgctgttcaattggttgtatgcagcatttgaattcttagcaacaggaacactgtacaagttcttcatagcatcttgaagtttagcaggaagcttaatgctcttgttattcttgtattcactagattcgattgcactattgtttacaggaatgtaaccagtagcattagcccacttaatttggcttgacttagatactaagaacttaatgtacttaaatgcagcagctttttgttcagcgctagcgtggttaaacatgtaaatatcagtaccttgttgcatggtgtatttgccaggacgtggagcaacatcataagtaaacttgttacctacaccttgcttaacaaagccttcacctgcagaagtaccaacaaacattgcaaccttttcgttagcaaatggacctgaaaggtagtgttctgaaccagctactctgaagtaacccttcttaataccatctgcatagaagttgagaactttctttgaagttgaaccactgaagttaatcttatcagtaaagttcacgccttcgtccttcataccaagagtgtagtagttggatagtgaatcaaaaccagcacctacaactttgtggttactcttcttgtagatagtttctgaaacatccttaagttcttccatagtagttggaactttcttgatgccatatttcttaaacatggtcttgttgtaagtcaaagtttcaattgacttgttaaatgggataccgtattgagttcccttaatttttgcaccatcaagaagttcagttctaatgtcagatgcctttgcactgccccaaccaacattcttgttgttgatatatggggtcatgtttacaagcatcttgttttgagctgcgttccaaagccaacctggataagcttgagtaatagtaggtaagttatttggtgattgcaaagttgagttgatcttagcttgcaaatcattgtatgcaccttggttttcaagcttaacagtaattttagggttcttcttttcaaattcattagttaattgctttaaagtagaaccttgtactcccggcatagcgttccagaagacaactgtagtcttcttagtaatctttgatggaatcttctctgaacttgatgaagaagaattgccgctctttgaacaagcagcagtgccaactagggccaaagtagcaacggcagccatagtaagtttcttactaaacttcatttggataaatcctcccaaaaaataaaactaaacaacaatatgtttttgatttactaaagcgtgattgtttgaccacgtttaggtaaaatccgttctccatatgggttctcttccagctctggatgcaatgtgtgcaccggtactaaaacagctggttgaaccccagcaatgatttccttgagttctttttcatcggcatggcctgaacagcgcaacgccttatactcaatatcattgttagctaaagcctctacaaatggtttgtaggcaggatcaaaatcccctaatggctcagcatttgagtggatatacaaaccacccttttgcagcttatcataatcggtgacaacttgccacatgtatttatgattatctgctaaaagctcatcatagctaacttctagctctggcttaaggtcagcatagtgctcctcattaggcatgtaatagtaaggatagtcttcatccaaactttcattaatcaaatgggcacgctgagcatgtaaaacgacctttcttggtgaatcggcaatgattcgcaataatcgttcaacattagtaggataagtattaaaagtgatttggcgttcaggattagccttttgcaggcgcacgatttcttcagttagttctacttcattcttagggccagtaaactcttcactgttttcatcatgcttttcttctggccaagaaacaccagtaccttcaatgattagcatatcgctatttttagctgcctgcataaagtcccgcacccaatctggatgatagccatgcaagcgaatgtcgccagtataggcgatttgcttatccggtgtcttaactaatagaccagtagcaccgtaagcgtcatgatcactaggatatatttccaggataatatcgcccaccttaattggtttcttgtattctgccgcgatgattggacgagtataagtccgatcatgacctgcagcaggaagcaagaagtcgcccttttcattcaaggctggcaataaatgagctgtaattggacctgcataaagtggaatttctggggccaaaaagttcattgccttactgtgatccaaatgtagatgcgaaatataggccgccgcatgctcccagcggtcagtatcaattggcttacccgttaatttaggatcgtaaaaattaggcacatccccgattaatttatttttaatcagagtttgataactttcatctggcaattttaactctggccgataaacttcccccaagtcaaacaatacatgcgatttgttataggccacttcaatcatcggtccaccaattgtggttaaaccattataaaaagttactgtcgttttatcctttaaggtcattgcgcactactcctcgaataatttgctttctaaagatgaagtacaaaatcaagattggcaaaacagtcaatgtggcagcagcaagttgaagttgagtttcactacctgcatcagatgcaaatgaagttaaaccattgttcaacaatctcatgctgtcttcgttagttaccaataatggccagaggaatgaattccaaccagaaatgaaacttaataaagcaacggtgaacaagccacctttagacattggcaccaaaattttccaaatatattcccaatcactcgctccgtcaatcatcgcagctttataaattgtctgtgagattgaaccgaagtagctttgcaagtagtacatgtagaaaattgaagttaaaaatggcaataccaaaccaatataagtgttcaacaagcccattctggcaatggtattgtagttagtaaagataattgcttcaccaggcaccatcaataatgataaaagtaccatttgaacaacacctttacccttgaacttcaagttaaccatggcaaaagcaccaagcaaggcgttaaacaaactcacaattgtcgttacactagctgtgataaaagtgtttaggaagtaacgagtaaatggagcttgggcgaatactttggcataatttgaccattcaaaatgcttaggaatgattgttggtggaatagtggttgtttctctaaaactcattaatccacccaaaatcatgtagataaatggaaagacagtaatgattgcgaaaatcgctaaaataatataagcaatcaaagtgccccaacgaatcttcttcatcctttactgtcctccaatcttcttcatcatcttgcgttgcaagaatgtgacaaacataatgatgataaataagacaaccgttgcggccatcgctacacctggagtaccaacaatttggaacttgttatagatgtagaacactgcagttgtggctgagttaccaacacctgcttgtccattgaataaggcataaacagatgtataaatcttaaatgcagcaatgatattcattgttaataagaaggcgatcgttggcacaagctgcggcattgtaatacgccagaacttttcagtaccagttgcgccatacatatccgcaattgtgtagtaattagggtcaatgtttctcaaagcccccatcaagataacgatgttaaaagctaaagaagtccaaacaccaaagatgataattgtcgtcaatgacatcgctggatcatcaatccagttcggtgttggtaagtgaaccgccttgagcaagaagttaagcaaaccatagtcaccgttaaaaatataacggaatacgataccaatagcgatagttgacgtaacatatggcataaagaaagtcgtttcaaagaatgacttatgctttatcctgctgaaaataaaccaggccaacatgattgaaatagccaaagcaactggcacagaaattagggcatacaaaatagtattcttgattgcccgccaaaattctggatcactaaagatatattgataattgctgaagccactccaatttagattaattaacgagccgctttgaaaactcattacaaaggcccgcaaaattggataaatactaaagaaagtaacaaagataattgttggcgctaaaaagagccacgcctttttctgattgctcttcattagtagacacgctctccttccttagtaaacaggaatactcgatcaagacgcatcttcaaattgatattatcaccaggcttaattggtgtctcaaggttgactaatgaacgagcttgtaccccatcatgggtaaacttcaaaattcgttcacgaccgattaattcgacatcatcaaccttagctgaaactgcaccatcttcttcgactggcaaaatattttctggacgaacggataaaacgtactcgccgtcagttaagtcacgtttaaaacgatccttgtctaaatcgtccacgttaatttcaaaatctgagccagtaatcttgccgccattaacctttacattaaagttatcaatcacaggattaccaacaaaattagcaacaaagtagttatttggttcaagatagaagttttgtcctaagtcatcttgttggatcacgccattattaaagagaataatcttatcaccgattgacaaggcttcttcttgatcgtgagtaacaaacaaggtggtaatacccacacttttaactaaagcacgaatttcttcacgaatcttcaaccgtaaacgtgcatccaagttactcaatggttcatccatcagcagaatcttaggttgttgcactaaagcacgagcaatagctacacgctgctgttgaccaccagataaattgcccggcttttgatcagcaagttcggtaatctgggtcgttgccatatatttttcagcaatcttcctcgcctcatccttaggcatcttttgcttgcccacagtcagaggaaacattacattctgaagtacagtcatatgtggatataaggcatagttctggaaaacatagccgatctgacgatccttaggtgctacgttaacaactgacttgccatcaaaaaggatgtcaccgctagttggattaagcaaaccagctagcatatttaagatggttgttttaccacaaccagatgggccaagcaaacatacaaggtcacctttttttacggaaaagctaacatccttgattgcttcatgaccgttatcataaacctttttaaggttctttacttccacgaatttctcatcattcataagtttcacgcaccactatatattgatttaaatttttaaatttttctattaattctaagctaaatatacgaaaataacaaataattttcatttgaaattcggggtttcaacgactttgtgaaatgcttctcagcaagtattcggcttttgttcgcatttgcttttatttttcacttatttctttttaaaaattcgggtttactaaatattgtggtaggtaccaaaaaagccatgaattagtcatggctttttgtatcataagttatctccacgttcaaattgatattttgaactattcaaggcttgacgaaccaacttgctcatcaagttcttagtctttttggtaatcacaccagcagtttcatcattagcgctagttaaatatttaataagctctctgccttccatatttttagctttttcatcaataagatcaattcggccaataccgtagctttgacaatcatcacgataggcgtttacctcataaatatattggtgatagcgtggttcaacaagcacttgtaaagttttatacaaccagtaagcactactatctgaattaaccatatgatctgccaccttatagttaagtggtgtatcctcaatattggtgtagaaaggaacatatggtgaatatgcataaaagcccatattaatccattgaattgcagccatcttggcaggaacatcatttctaatttgcaagatgcttgattcttggtttctgtctaaagcaatagaacggaacatcttttgttctttttctgaaccagatgaaaaagtgtccattggatcgtatggtgtaccgttatagtgactagttaaaaatctttgcacatcttcaacaccaatcttcttttcgggaacgcgcgtaaatggcatttcttgactagttgggtcttgttcaatgcttggattaaacaacttctgtccataccaagttcttggagtattgtaaaaagcatcagcttcatccttagtaccaaaaatatctctgaaagaaaagctaccgtcagtactattgtttaaatgattcttttctacgaattctcgaataccagctgaatacataaagttatctggatcatcaaagtcaacattttgaatcaccatgatgttaggacaaattgcgtaagaatcatcaggaacacgagccgcaacccattggtgacccgcgccagtttccagataccaaacttccttgttgtctgaaaaggcaataccgttgctttcaccggtaccatatttttcgattaattgccctaagcgcttaacaccttcacgagcagtcttcacgaatggcaaagtaatataaaccattgagtcttcgttgattccatttgctactaaaggatcatgtcctaagcagcgagcattagtagcttcagtttcagtggctgacatagcaacgttatattcgttaatgccttgctcgtcccagcgaccttctgaatcatcagcagtagggacagcagtccatttgcagccatcgccctcaaggtgcatcttaaagccgttatattttgatacataatcttcatcataatgacgggctgggtttaccacaaaaactttttcgttaatgccaccataaccgtcttcgtcacgcgcaatcatggttgatccatcgattgaagcgtccttaccaactagcattgcagtacagttatcttttttcattattgtttgtacttccttttttatttcagtaataatttttcatattattaattctactactcattaacctgcatttgccgatcaacttttgctcgaccgttattatagttaaaaacataaccgggctgcacgttatagagatagacattgaagtttaaactgccatcagttgaaacggcctgcaaattcacgccgcgggccattaactcattaccacgaaaaacagcagttgcttgataaattacacgcttattctgccgcagtgctctcctaaccttagcctcaaaaatagtctgaatcttttggttagaataagcagattgcgtaaacaaattcttaggattattttggtcccctgattgattgcgtggatcataattgccgctttgatcaattccagctgagactgaataggcaatcaagtggccccgattatagatttgggtaccgttacggtgattatagtgccagccagtcggttcaacatattgccttactcgcaagctatcattagccacattgcgcttttccaaaaaggctgtattagagcgcgatgttcgattcaatgaatcaaggttagagtaaatcacccgatttatcttccatgcgcctttgaccaaagtcgacttatcatggttgacttcggtataagcgcgactgccactcttaaaattcaaattagctaatttttgataatcagttggcgatagacctccataattggtcttggcttttgatgcatcgctaattgtattagttacatgttcatcattattgccagtaaagtcacgcaaaaactggctaccatttggatcgctgccagctttagtaaaaactccccataaaatcgcgattaagacaattaatgatgaaacaaccgttccttgtttttttcgtcttcttcgtgtcatctttttcctctaactacgagcccaatcatcaagcatgcttaagaaaaaggtctccgaaaaacgcttaatcttagcaccatttttgatcaaatcacgtgctgcattcaaatcctgattatcttttctaaagaaatcttgatcacccatgattaagtaattagtcgttgctaacactgaattgtcaacttggccgcccatattgttgatcatcttgcccgcttcagcttcgttcatatgaatattgccagacaaaacgatattcttattttgaaccggattgtgccaacctaagtcaacataatccaattcgccaatagttaggtcgatattcttaatcttgctttgtgccttttccaataaatcatcagtaaagtgctgggcaaagtcatcataaaccttgatcgtatcaagagaatcctgcaaaccgtggtgagcctcaacttgagcaattccagcccgctgcatgcagtcaagcagacggttatggcgctcgcgtggataatatgtccgcgccaaacgcaatacgtcaacgtaatcattatcaagcactggtaagccatatttttgacttaaatcatacaaaaagttcaagtcaaaattgacgttatacccaatgataacgtcatcaccaataaactcacgaaattcacgaatagcctgctcagccggaataccttccttcccaatttgctcttcagtaattccatttagcttagtaataaaagcaggaacagaattattcttggaaaacttcaccaaattagtatattgatcaacaatttgaccgttacgtaccttaaccccacctaattcagtaattcgatcgcggtaaggatataagcccgttgtttcaatatcaagcattgtataattggtcaaaaagtcaggcttttcctgtccttttttacgcaacttgtcttgcgcaccggtcacatgtaaaattccattttttatgtaaatactcattcttcacctatttaattatttaatcaaattcatcagcatctcgtgcgaattgctatcaaaacccattgctcgtttcttaagatcagctggcaaatctgcatcagctaaatcagcggcaatataatgccaattaggaaattgctgcactagctttaccattggatcaagtaattgaggactggtctcatctacgcctaattccaaaattacgacattcttgtcctcggctcccgttagaaaccaacgaaaacgcgtattagcatcggtatcagggaagaagttagcattcagcggcatatgcaattccattggactattgcagtcctcgcactttggtactaaatctgccgttacgttgccgttcttaattgccgtcataaagcgttctactacttcatggttatccttttgaccatgattaatcccgctagaacactgcattttagtccaatcaccaaaggcattgaaaattcgattttcattaaagcctgcattttcaaaaaagtgcccgaatgtactggtcgcaataaaatattttttatcacgaattagcttttttagagcaagcatcgtctcactaggctcatattgtaaggaatattcgttgattagctcactccaaaaagcccattgctcgctccaagtatcaaatctcttatctaatgcatccccaattgtatgcacatcatacttatctgcaattttgccaaattgatcatcaaagccttcttcacttaggatatctagtccctcttctttggccatgccattaccagccgttacgatcaccgtgttagcatttttcagccatttttttgctgtcactaaatctgccattttatctctttccctttgaataacctgtcaagcgtaattgtccattaatgtattctcctaagaaaacatcactgatactattataacctgcctcttcaacttgttgctgtaaccaagcttcgcttttgtgaatcaactctaagacatcaatattagcctgaccatcactaattattgggaaacgaatgttagcttcatcattttcaataatagttaattgcccgttttgctcaaagatacaattcttaatcttttcaacagagtagatacctcgactgcgcaatttaaacattaattcattagcggagattcctgctttcatacagttgccaactaacaccttgccatttttaattacttgaacaggtttaccatcgataatccctctaatccaattattgtgatcacggctgaatttcaaaataaaaacaaccaacgtccaaacaattagaactaggaaaaactgaagaattgtaatactaggattgtaaatcaagccaccaataattccacctaaaacataattctgcaactgatctaatgcagtcgtaggagccagattagacttaccaaagacattgatttgaatgattaaagttaagataccgagagcaaacttaatgaataattgtgtgtaatctagctgcattattttattacctctactttatgatcaattacatgggcttgcgttaatgtgtaagtattgcgatcatcattaaggtttaactgataatcaatatttttagaatcaatccttacgatcatgccattagttaaaaccgttgaactaactaaaacatcagaagtcgaaacattttcatctttagcaatcgatttgatgaatggcacgatttgaatcgcctgtgatttttgcgtattaagttgcacatatttttcatattgcgtaccggcaaacaaaagcaaaaataataaggcaataatacccaaatcgcgatacttggttgcaaaacggttatgtaaatatagcaaagcaaaaattatcattgctaacgccgagactgtcaagaagtttgtgtaaataatctctctcgttgattgacttttttatttatcttttaatcaaaataggattctagggtgtctcgaacttgcccaaatcctttatgaatcctgttaaagtaacggtcattgtaatccattgcctgaactccaataaaggtgtcaagcgactgctcagttggaaattctgttttaggcttggttttccgcttaagcctgttgttaaaggattcaatcatgttagttgagtaaattgaagctctaatagctggcggatagttgtaaaaggttaacagatcaggctcaacctgtctaagatctctaactacgtttttgtaggctttttcccagttttgatagaattcatgcagcacctgtacagccatttctttgtttgactgagtatgaatctgcttgaattcatccagtgctttttttcgatcgtcaacccgcattttggcactgatattacgcatgacgtgtaccaagcagcgttgaaaatgcgctttaggataggactggcagatagcctctttcatgccaactactccgtcagacaagaagagctctacctgttcaaggccgcgactcttgaagcctttgagcatttcgctccaaatctcaatattttcagtaggcgcaatacagtagtcaatcacttctttatgaccattaggtttgataccgatggcgatataaactgcttcgcgctcataagtgacccgcttaagaggaatataggtggcatcgagataaacgcagaagaacttatctgacagatgtcgctgatgatatgcctcaactttgggaatcatttctttagaaatattggaaaccatagctggagaataatagccgccatacattttctcaatcaaatcagcgatttctcgggttgtgacgcccttggaatagagcttgataacagtttgctctaaaacatcagtatgccttttataatctggcatagtgtgttgatgaaactcaacgtttctgtctctaggaactttgatttctatttgtccgaattgcgtatcaaccttgcggtaataagcaccatttctagagttgccagtattccagccatttctggcatagggatcatagcccagaaaggcagtcaattcagcttctagcaagttattaacagcctgttgtagttctttgcgcaataaatcatttattttgtctggattgaatagagcttgagcaaaatctttggtaaaatcattcatgaaggagttcttctttctgtatgtgtttttttgttcaaaccaatcatacgagaaaggaactcctttttctaatgtttaaagaaataaatttaaggaatcattcatccttacacaaactattttacagtctcctaacgccgccaccaacatcaaagcatataatactgcctgattagtattctggttattttgaatatatttcattgtataaaaggtcatgctctacctcacccttcatatttttctttcattctaacacagaaaaaaagtagcactttcgtactacttttactagaaattattcacttttcactattattaattatttttgaatttcttttaatccagctttgcgacggcccatgttaaaccatggtgaaacagtgaaggctaacacatcattaattacatagatcaatgaattaattgccatggctaagtttgcatcaccttgagcataagttacgcccaaaagaatcaactggaagacgccactagcagtccaccaaaagtattgattgttgtaacgcataaagcacatgatcccagcagttaatgaaatagcaaaactaatagcatcaatccaaggacgaggatcattggtaaatttaccaatcaaaaagccggatacaacataaacaagtaaagtaccaacaatagcaacaagccattcctttgaaccgaattttcttaagtgattcttagtgtcatcattccatgatctaacagcaataataactggtaaatctaaagttgcaatataagcaatctgttcaaaaatggaaagataattcttagctgaccaacctgcatagataaaacaagcagctgaaatcaaccccaaccaaccattaattgctttagtagcgttaattgccaatacacaaagtgtacccaaaagcgtaccaataaaagtaatcaaagttacgcttgtaattttgccttgaatcagcaaagctaattgaaatccaaacgcaaaaaaccataaacagtaattttgaactggccagcctttcaattgattaaatagccaaacaaaataattttcgtgttttctttccattgtactgagacgtaaaaagtagacaattaaaatattggattaatagaggcttgacttcgatactctttcggggttaagccttttaatctgctctttatcctttcgttgttatagtattcgatatattcctcgattgcttgagttaattcttgaagattatgatacttgtattcttgatcatagaacatttcagttttgagcaggccaaagaagttctccattagcccatcatccatggagttgccctttctggacatgctttgagtaataccatggagttttaaagctcgctgataacgagggctttgatactgacagccctgatcagtatcaaaaatgcagttattaagagctgtttctttggcaaaagccttgtcaagcattgtcattactaaatctatatctggatgtttggagatagtataagaaactatatcgccaccgcagccgtctagaataggcgataaataaagcttttcattattaagatgaaattcagtgatatcagtataccattttgtgttaggcagggctgcgaagaaatcacgatgaattaaatttggagctattttgccaatagtacctttatagcttgaatatttgcgcttattgcgcctgatgcctttaagacctaatttatgcatccaatagcgaacggttttctccgtaactttccagccctctctgattaactgcaaagctactctgcgatatccatagcggccttgatgatgattaaaaatctcatggattctagcaataagctttgaccgtttaggcttgacgggctgtcgtttgataatcttgtagtatgagcttctggcaattataggtagctcagggtgctctgcaatcgcagctaatacataatttaaactaactttgaattcttgccttagatccgtaatcaccctagctatttcttctgatcttcttgatccaaggcacttagtttttttacgtattcgttcacaatacgcaatcgcaagttttcttctttcagctgctggatctctttctccagttccttgcgagatttctgcttttctttggtcacgggcagggcgtcctttctgtttgataatgacattatacccgtttttcttatattctctaatccaattgttaagcatgccaatacttttaaaccccagttccaaaggcagctgtaagtatggtttattgccaaagattgcttgttcaatagttcgctgcttaaactctttggaatagctttggtttttagtagttaaaatttctattccatgcatatcaattaatctaagcatatagtctaaattagctagattcattctgtacgctttagccaattgactgattgagatattttcatctttccatttatgataaatttctattttttgttctttattaaatttagacatagtaaacattctaagctaaatagtgaattagttatccgacgggataattgattcactatttttattcttttgtagaattaaagtagtggtaaaacgatatgccctgaggtctttagacacttgatgtcgcataataaactggcagttttacttaagttttcaatagtctcttcgaagaatgtggacactagatgtcgagtttagaaaattagatctgatttcttaagtaaatacgttttactactaagttttggaggtttttattatgcaagttacttttggaattgatgtaagcaagtctacttctactgtttgtgaactaattggtgaaagcaaaaatgaactaaccattactaataatcgtcctggttttattcaattgcttcatgaattaaccgctttttctaaacatccgcaaattatttttgaagctaccggtgtttattcacgcagactgcaggcttttcttgaagactacggctatgaatatgttgttattaatccgcttaaagccaaaaaagagatgaatatggggctacgctacaacaagaccgataaaactgatgcttatcatttagctttaattcaaagactttatcgccatccggttaatcaaagcgaatcccaaacttataagcagcttaatgctttgagccgcttctatgaccagctgacaagtgacttggtaatagctaaaaatcgacttcaccaagctctacaatcgacttttcctgaaattgaaaatttattttcttctgctaaaggtaaaaattactggcaaatagttgtgcgatatcctcattgtgacttagtaagaagagaagataaaaaacagcttattaactggttaatgagcttaaaggggattgcttttaaacacgctctaaggactgcagataaattaattgaattagcttatcaagcttatccagttgtatcttgctctagcatagaagtcgagcaagtgcagtattatgcacacagattgcttaatttaagtgatcaaagagaaaatttaatcgcaagaatggttaagttagcgaagtctttgcctaatcatgatttagaaaacctagaaagcattccaggctttgcacagaccactgctgtcagagttttagcagagttaggagatttacgcagatttagtaatcctaataaaatcaatgcttttatcggaattgatccaggcagatatcagtcaggagaaatggactctaatttaagtattactaaacatggcaatgcagtcgcacgtaagttgctttatcgagctattggacaaattgataatgcagctaagacaaatccgtgtcatatagcagattattatgaaagcaaaaagctatcctctcaaaccaaagggttcaaaaagatagctattgcttcaattcataaactaatcagaaccatttatgccctgattatcaatgatcaaccatatgattacaacgtagccacacataatcaaaaagactttagtcgtaattaattgatcaagtacattataacgctaagcccaaaaatcagatatggatctgggcttatttgtcgtgtctaactaaaaaaataaatcgacactaaaagatgtttaagttgaaatttaaacaaaaaatgaagccaaacttcttattatgcttgactttacgtagaaaaagacctaaaagtgtctaacttttaggtctcagttcacatcctattcaacattccccttttttattttaggttgcaaaatacaagatcttgtgccttatccgtgctatgtaaaaaaacatcgatatctagtatagtggaccattaattaaatacaagaattgacatttttaatttttgcgttaataacatatttctatttccgtttatcaagcaaacatttattaattttttctaaacagcaaaaaaattttgttccttttagtgacacagtgtcatatgatatatacgtgattattaatttatatttttatggaggtacactcatgtttaaaactaagaaaacgcaatttgctatccgaaaattagcacaaggcgcctcagcagttttactttgcttcggcatattgggcggagcaagtgcacctatcgttccagctgcaactacagatgacccaacaaaaacagtcactgaaagtacaattaatagtgagaatacttctttcaatattgaaaccaccaccaatgcatctgataaattcgcttccatcagcaaaaatgggggggtacaacggtagtgccaaattctgctgagccagtttctccggatcagtccattacagaaaatgataatcagcaagaaaaaactactgtagagaattctactgagatatctgagcctgtcaaagacatcaataagtttgataatgatgccaatgttgataaagacgaaacaatcactgtaaaaaagccaacaattaatgtcgacactgaaaaggtagaacaaggcgatgaaacagagaaaagtaaactcgaagaaattaaaaagtatattgaggacgtagccgcaaaacatccattaggcattgccggaattttccacctttttggtaacgaaatagatggatctgctcatattgcaggaaatgtcgcaacagacaaattaagtgctggcaacttcggtactatccaagatgccactagtaacttgactacttgtgatattcattacatcggcagtattgatcatttgaatcagattgatggcgaaaataaactagttatttttggtccagatgttgaatataaatcatacgaaaatggtagttccattcaggtaaaaataaatggaaattggcaaaaagtaggaattccatacaacaaaactatcagagctgaccaaattctagatattcaaggcgaactagataaattaagcgataaatcagacgaatgggctaagcaaacgcaaaccgaaggcgtaattgctgatttcaaggagggtaaatagttggatcgacgtttctaatgctatcaaggatggcagcaaagatcctatttatgtaactattgatgcaaaatacctttcaggcaataacaagcatgaaattgctattaaaggcatccctgcagacgcagaaacaccaatcatcatcctaaatgtaactaatgttcaaaatggcgatttaaccgttagcacaagacttgttttggattattcagaccaaactagcatcaatggcgtaagtgaaaaaccatctcaacttaataagttattatggaattttggaacagatgttaaaaatttaactattgaaggagacttccatttaggtagtattttagctactaacgcacatattaccgctaacaaaaatgttgacggtaatatcattggtaacaaaatcactattaaaggtgaaactcaccgttgggacctaactccgccattagtagaagttgaaactccgccggaggatccaaaagatccacctaaagaccccgaaaagccagagaatccacctaaggatcctgaacctactcctgagcctgaaccggaactaaagcctgagcctactcctgatcctgaagaagagagtactcccccattaccagaagaagtaattcctccaactgataatgaaaattcctctgacttcaaggaagaggacactgctcctctaccagaatctgttgtagaaaaacaagttaaaaagaatcatccatccccttcaactactgaagaaaatattgcacctcatgctgcgactatcccaacctcaactataactgaaaaagaaacagttttacctcaaaccggtgaaagccaagacaagctaatgacgattggactcatcactactagcgttgcttcattgtttgcagtattaggcacagtaatcaaaaaaagaaattaattaaaaatgattcaattcaagccatttttattcttaaaataatctagaattaagtgaggattaaaccatgttaaaaaatagactaaaaatattccaacaaattcttcctactaaggcaactaacactccaaaataccaattgcctatcaactattacgatcctgaaggcagcatggttggcacttattctggaattaacttggcggcaaatgaaactatcactcaccaccagctcaaaagatttatcaacatccatcttcccgaaaactacgaagtttttccttactttgcttatcctaaggagaatatcacctgtgaaaatctgcctgatgaaataatgatcacaatcagattatctaattaaaaaaggcgactcgattgagtcgcttttttcattgcaattgatattaatgttgcgaagcaccagttgtagtatctggttcttcgtgcttttcttctttaacttctgcagccttagttgaagcaccagttgcggcgtctggatcagaatttctacggtaagttgcaccagtagttgcatcatcatctactaccaatttttgaccagtagtctcacagaagtacttaactaatggatataagtctttgacccattcataaataccagcatagttaccttggtcgtcttctacacgcttataatagtccacaaccaacttcttcaaattgcctgttggtattggcatataaacatcatcatgacctgcttccttagtccgcaaagcatgaacaacttttttaacattcggaataacgtcacgaacatctgggtgaactgcgcgcatcgtatcacccacttgatctggcgtagctagcattttcttgttaggatcagttggacggttataccacaagaattggttattatcatcaacaaatgtcattttaccaatggtatttctcagcatccaattaagttggttaacagttaacagacctgcatcaagtttgacataatcgtcaccctccgcagcatgaacttttttagctgctttatctagccaatcaggatcatttttatcgattccctcaactgtatacttagacttaccctttgcatcgaaatcttcttttaagtattcatcggcattcatatctttaagccattttggttcagccatagtaagaccccctcgtatgaactttgttaatctaattatataatgtaagtggtttcaattcaacaattttaatatatttatataatatttttactagctggattatatattattttacgcgtggtgctagttaaatctttctagacaataagccaaattataagctaaaattgcaatttccaaccggctttgaaagcctatcagactacgtgctcgattgttctcggcattgtaataggtcagaagcgaaaagtcgctttcaattgttctgcgaatagccatcaattgatgatcattgtgctttttagctcctgtcatatttttacgatatggtgtccaaagttcataacccatttgttttagctgttgatgcagttctttgcctaaatagccttcgtcgccaagaagatagtaattagatggatgggtattttccagcagttcaactgtctccctggcatcatgaactgatgcttttgttacgacataatcaagaatgtaaccgtcatcgctaacaatgacatgaactttgaaaccatagaagtaaattttcttggtggccttataaccaatgttggcataaccgcgaaaaattttagcacgatagttgcgaattggttggcaaacaggtaccggaaagctgtcaatgatcaagaaatgtccattcaggtcaacctttttattcatttcttgccgtatctgataaatcaattgcaatagctgacgtgaacgccgattaaaacgtgagtgtgataaacaattgaaacattcacagaatcttctttgtgattcaattcctgtcttagcttgccagataagtaaagccaaaatcagactgtccgtagttttaatttgatcaatatttcgccgatgagtaaactcagccggtgcatacaaacgataccagtgccgacaaattatcactaaatctttaaaactaacttgtaaatggtggctaaaacgcttaagcttaaggcagttcaatcagatcagactcttttctattattactatttacaagtcgagtctaacaagattggacttttttattaactaaaacgatttaactagcaccctgcgtattattttatataaaaaaagctgatcaacgagcaactctttacatctttgtctcaattgtatgagtgtccaaatgaatgatcacgtcaaacatcgctttttcttctggtgaaatcttatgagccacctcaataacagcaatacgtggattcttcaacagcgtcttatgaatgcctaacgacaagttcgggtcaagcgcacttgtcgcttcatcagccagcaaaatcggccgatctgataaaagcgcgcgagcaatttctactctttgaatttgtccacccgacaagccactgccgttttcacctacagccttgtctagaccctgttcctttaccaattcatctagaccagcctcatgaataacttctttcaaatgctcgtcactcactttacgtcctaacgtaatgttgaaacgcaacgtatcatcaaacatgaatggcttttggttaacataggaaaaataattatgggcagcatcccaatttcccgttacatccgtaccattgatcaaaattttaccgtctttgggctttctcaaacctaatagcaagcgaagcaaggtggtcttgccccaaccacttggcgccatcaatagaactttttcacccggcttaactgttaagttcacattctcaaagatgcgtttgtgatcactacctgtaacataagataattgttcaacctccataccatcaaaatgatcgatcttctgcttatcatctttcagcacgtgatgcaaagcgcgctgggtcttttcccacattggcacagtcgacttgacttggttaaattcgttaaaaagagtcacgattggcgtgataaagttcaaggccaaatcgaccatcattactaatgtacccacctttaaatttccctgcagcatcataataccgccaatagtacatggtacgatgaagcaaaacaattcagcagctgaataaattaattctagtgcccaagcttgagtcaacgtcatattacgcagagcgttctccattgcctgggccgcaccagctgctcgtgtaacgatgttggtgcgcacgttataaagcttggtagcctgtgccccatttaatgaatcggacacattttgcgtatagttagcgttagtcgttgcccaaatcttggacttacgtgtaatgataggactagtaatcatttgaactaatgctggcgcaagcgtagcaatcaaaaatactagggtcatctgccatgaactataaaaagcaaaagtaattgccccgaaaaacgacaaaccttggaaaatcatatccaattgtgccgttatccgattagtttcaatctgttttaaatcgttggtcatcagtgataaaccgctcttgatatcaggctcaccttgatcaaccaaataacgcaagttagtgcgcttaaaggtcatattcacgtcacgaataatgcccatctttaccgtttcatagacaaagttactggccataaaacacatctgacctaaggcagtcaaagcagccaggcgaatcaaatgcagataatcatgcgatcctgacgaagcaacattcaacataatttgtaccatataagctacaaagacgatgttgcaggccttgattgcggccaaaatggtatagctaataatttggctttttttagcgtacttcaggctcattaatttctccttttctatcccgttagaaacattatacccgctagcttgtctttttctcaattagatacgataattagagtaatcattttaatttttaatgaaaagcagaaaggaacttttaatgaagactggtactaaaattattactttagacaacggttatcacttatggaccaacacccaaggtgaaggcgacattcatcttctagctttgcatggtggtcctggcggcaatcacgaatattgggaagacactgcagaacaattgaaaaagcaaggcttgaacgtgcaagttactatgtacgatcaactcggttcactttattcagatcagcctgactactctgatcctgaaattgccaagaaatatttaacctacgaatatttcttagatgaggttgacgaagtccgtgaaaagttaggacttgataacatttatttaatcggccaaagctggggtggcctattagttcaagaatacgccgttaaatatggtcaacacttgaaaggtgcaattatctcctcaatggttgatgaaatcgatgagtacgttgcttcagttaacagaagacgccaagaggttttaccacaaaccgaaatcgacttcatgcacgaatgcgaaaagaacaacgactatgataatcaacgctatcaagatgacgtacaaattttaaacattaatttcgttgaccgaaagcaaccatctaagctttaccacttaaaagacattggtggaaccgctgtttacaatgctttccaaggcgacaatgaattcgtaattactggtaaattaaaagactggcatttcagagatcaattacacaagatcaaggtgccaaccctattaacctttggtgaaaacgaaactatgccaatttcaactgctaagattatgcaaaagaagatccctaactcacgcttagtaactacacctgacggtggtcaccaccacatggttgacaaccctgacgtatattataagcacttagctgactttattcgtgaagtagaaaatggtacatttaagggcgaaaattaattaacagatattcaggctggaatcgatttccggccttttatttttaaggaaaatgatatggatgaaaaagatgtcaaaattctgctagttgaggatgaagaaagcgtcgctagcttcgtcaaaactgaattagaatttgaggattaccaagttgtttgggctgaagacggcaaaaaagcattagacctttttactcaagaaaagccaactttaattttgcttgattggatgttgccagtatatgatggcatgaccgtgttacggcgaatccgcaagcaaagtgatgtccctattattatgcttaccgccaaaaattctgcctctgatataagctctgctcttgatcagggactagacgactacctcaccaaaccatttgaaatcgaggaattgctggcacgaattcgggtagtcttgcgaagactggaaaaaatgcggcagcaaaatgacgtccctgatacttccctagaatttggcccattaaaaattgatctgcttaagcacgaattttactgtgacaccgagcaaatttatcttactcctaaggaatttgccttaatcactgaactaatgcgggaccccgaaaaagtcaaaagtcgtgacgagttgcttgatacagtctggggatatgactttgttggtcaaaccaatactgttgatgtttatattcgaactattcgcaacaagataggcaatccctacaaaaagatcattaaaaccatgcgcggcttgggctattgtttgagaaaattagatgataatcatgaaaaaagctgatcctcaaacaactacgcaacaattaacccgtttattcgttaggctatttgtcgctattttaattctggtcaatttggcttttctaattatttcatcggcctatatttattaccaagctgaacggcaaagtgaacaagttgttgaagcagtaaaagaaaatcttgattcaaaatatgactggtcggctatgctggatgcttatttggcaaaacaagacgatgatgccatcattttaaccacccctcaaggcaaaagttattactctgaaaatgctcacgagacctttaaacaaattaatcgccaaaatcattatcaaaacatggtctattccaataagcatatttacttcttacggacggaaaactcgcatgactttaaaatcaaggttgcattaaacattgatcgcttatttcatttaattatttggctatttgggacaatgattgtcatcaacttaatcgctattctgctgagcatcccccttattcgccgttttgcccacaaatggagtcgtccaattcaggtaatgaataatgaaattcaagaaatccagcaaggtgcttcaactgagcaaatcacagtgccgcaacaaccattagagattcgaaaattagcccagtcttttaacaatctgctagcttttcaaaaacaggccttacagcgtgagcaacaattcgtcagtgatgcttcacatgaactcaaaacaccaatcgccgcaattcgaggacacgttaatttaatcagacgccatggtcaagccaaaccagaaatcatccctaagtcactggattatatcgatactgaatcaaaaaagatggaaatattagtcaacgatttactcaccttaggaagaatcgaacgcaatactgaagtcgtcaaaattgatttggtaagaattattaatttggtaagaattattaatgaagtagtgtcagaaatacagtcagtttatccacaaaaaatacagactgacatgccacaagtattgaaatatcgtattaattcactagattttcacaacattgtgcacaacttagtggaaaatgcggcaaaatattctcctcaagacagcactattgtagttaaattagctaaaaataaaggacaggtctctttcacagttgcagacaacggaatgggcattgcgccagaaaatcgcgagaagatctttcaacgttttttccgtgaagacacgtcccactccaataaagttaaaggatctggcctagggttagcaattgtcaaagctgaagctgataagtatcatggtcaaattaaagttacggataatagtcctcagggaacaatttttacagtttcttttcctacagaaaaatgaagaaatcttcatttaaactctattaaatcttagttttttaaagctgcttagctagtaagataaatatatcaagttaaagcaaaacaaaaaattatcaatagtttaaaggagaacatattatgaagactattaacttaaagaaaattactattactggcgtagcattactcggcttaggaactgctgcaattaccgcaactaatttagctactgaacctaacgtagttcaagctgcttcaagcaaaattaaggtttcacaaaattcagctgttaaaaagtttaaggcaaaattcaaggcagctaaagtcgaatcaatcagcttagataaagaaaaaggccgttacgtttacgagatcgaaggcttcaattcaacgagagaatacgaaatgaaaattaatgccgcaactggcaaagttatctcatcccactccgaaagacttgatcgagacgagcgtaataaaaaagcattaaatctcagcaaaactatttctcgctcaactgctactaaaattgctcaaaaaagagtatctggcaaggcagttgaatggtcattagatcgtgaaggttcaaagaatgtttgggaagttaccatcagcaagaacggccaaaagagcgaagtaaaaattaacgcaattactaaaaaagtaatcagtgttgaacgggactaattgagaaaagaaggtatagaatagatgaaatttactaaactgacaagtattgcattattaagcgcagctttattaacaggaactgtagcatgttcaaaacaagataattcaactgctaaaactactacccaaaagagtgttacttcatcaaaggttacacataattctgaatcagcaatgagcaaacaaactcaaaaagataatattcaaatcaaattaagccagcaagaagccattgataaattccatcaacaatttagtggcaaacagcttaaaagcattgaattaaatcgtgaaggcaaacattacctttatgaaattgaaggattcgattcaaacaatgaatattctgttaacatcaacgcagaaactggtcaaattggacatgttcattcagaaaagttagatcatgatgatcgaaaccaaaaagctctagatttcaagggcaccattagccgcgacgatgctagtcgtatcgcagaagagcacattaaaggcactagcgaagaatggaaactagagcaagacgaagacactggtaaaacatactgggaagttaaggttaaaaatggtcatcaagaaaccgaagttaaaattaacgctcacaccaaagaagttatttcaactgaacatgatgattaataagattaagaacataaagaaagccgcaacattattctcgaagttgcggctttttattttgtctaatttttggataacttttttaccaataaccaatcagtttgaggatcgctaccaacttggaaagtatgctggctcactttttcaaatccatgacgcttataaaaatattgtgccggaatgttcttttcataaacgcctaaccacatgtaatctttgccttcttctcgtgctgtcttttctgcaaaatcaaacaaaacattgcccaacccgcgatgttgaaaattagtacgcagataaattcgttccacttctagagcattatcacgtaactgctcagtctgagcatccccaacattgatttttaaataaccagcaatttttcctttaaccattaaaaagtaaaaacgactattaggattttcaatctctctaatcaacttttccgtctgataatcttcctctaaaaagcgtttcatgtcatctggtgcagtataaggatcaaaagtcgttttaaaagtttcacgtgaaactttctgtaattctttcacatccgctgttgtaattgctttaatctcgtacttcatcaatatttcctctttccaccgttcttaaccaggtgccaattttcactggcattcttttctacaatttgtaacaaagcagctaattctgttctctgtttttgatctagtcctgtcaaaactatttcatttgaataagcattttctttttctattcgagcagctaatttatctcctaattctgtcacaaacaaatgcttaatctttttattctgctggtcattttctttcctaatcagctgattttgttccagttttttaatgctacgagctgccgtcgtccgatcaacattaagcatccctgctagatggtcagaaataattcccggattttctttaatgcgggctaaatacaggtactgacctcgattcaattgcatctctttaaattcaatattagcaatcgaatcaagtgctcgcgcaatagtgccaatttgacgcaaaatatcttctttcatgtttttcacctaaaaactattatatttaattttgttgtaattgcaacaataaaatataaaaactaaaaaagggatcgctccctttagttaattcatcaatttttctttagttcatttagatcgactacctgatcagctaactgcttaacttcatctcttaagtggtgagttaccataattacggttttatctttttgcgtcaaaatcaatctttctaattgtacgctagaagctttgtctaaggcagaagtagcttcatctaacagataaattggtgtatcacgcagcaatgcacgtgcaaaagcaacacgctgtttttgcccaccggacaactgtttaccttggtcagctaaaacagtatccatgccatcaggcaacttagcaattagatcctctaatccacattctttgatcacttcagaaatttttgcttttgaaacttggcgtcccaaagttaaattccaccctagagaagcagtaaaaatatatggatcttgctgcaaatatgtaatctgatcatgcaaatccttatctgaaatctggttatattccacatcagaaatttcaattttcccctgataatctctaagtaagccagaaatcaaattcagcagagtcccccatcagaatatatttatttttcagtttaaaatttaaattcaaattctcaaagataggcttatcttgtccagaatactgataagaaactttatccaattctagattgcttagtttaaaatcagcaggcaaagctccatcaacagttttaagcggtatagtcttaaatttttctataattggtttaactgatttgaattcttgccaattaaaactaatcccacttaattcagcgaaaattgtactggcaaaaaattgtgccccactgatggtcccgactggcgttaattgatgcaaaatcaaccagcctgtttgccctaaaatgataacttgactgataaaggctagaccattggtaatcgcctgagttatcccggctgttttactataatttagcgcatgttttttaacatcatcagaagcgccattgatctttttgacgattgtttgcggtaaattggcaagaaataaggtattgaagccattcaacacatcattaattgaattaaccaaacgttcattggcatgggtatattctaatgaccttttggccaaaattttagaaaacaaattgggaaccactcccataataattgtcaaaataatcacagtgaccacaagactgacattgaagtacgccaaagtgagcataccgaaaacaatttcactgatttgtctaatgatcatcatgaaatcctcgacaccaaagttattaatggttgtaatgtcattggtcagccaagaattgtaagtagctaccgtttgttgatgaaagcctgaataactcgtctgtgatagatcttgcgcaatgtcatttctaattaatttatccacattttgtgccaaacgggtttgctcaacattgactagacagttaacaatcgcgtaaaaaatataggcaccgcccattaaggcaacccacatgaaaaaacgctcagcttttaattttgcaactgcacttaaagcattagcgctagatattccggctagtgtcaaaaagcctgcattaatgactattaaaaatgtaacaaataaaaattcccactttaatcttttaaaatattgcagtaattccattgattctccttatgagactgtaaaatagtttgtgtaaggatgaatgattccttaaatttatttctttaaacattagaaaaaggagttcctttctcgtatgattggtttgaacaaaaaaacacatacagaaagaagaactccttcatgaatgattttaccaaagattttgctcaagctctattcaatccagacaaaataaatgatttattgcgcaaagagctacaacaggctgttaataacttgttagaagctgaattgactgcctttctgggctatgatccctatgccagaaatggctggaatactggcaactctagaaatggtgcttatttccgcaaagttgatacgcaatttggcccaattgaagtgcaagtgcctcgggatcgcaacggtcaatttcatcagcacacgctgcctggctacaagcagcactcggatatcttggaaagcatgattatcaagctttactccaagggcgtgaccaccagggaaatagccgatctaattgaaaagatgtatggcagccattacagtccagctcaggtatcaaatatttccaagcagatgattccaaaggttgaggcttaccacaaacgcaagctaagcgacaagtttttctgcgtctatttggatgcgacataccttcctttgcgccgagaaacatttgagcgtgaagcagtctatattgccattggcatcaagcctaatgggcacaaggaggtcattgactactgcattgcgcctagcgagaacattgaagtctggacagatatgcttcaaaacatgaaatcccgaggcttaaagcaagttgagctttttctttctgatggtgttgttggcatgaaaacagccttggccaggacttatcctaaagctcattttcaacgctgtttggttcatgtcatgcgcaatatctgcgctaaagtacgcgtcgacgatcgtgaaaagatcatgaacgaattcaaacaggtgcatcaacagacaaacaaagaagaagccacagctgtcctgcatgacttctataccaaatggggcaaggtttacagccatgttatcagaagcttgaaagacatagaaccagatctgctggtcttttataactatcccaagcagatcagagcttcaatttattcgactaacatgattgaatcatttaacaatgtgatcaagcgcaaagctaagcctaaggcagagtttccaactgaacagtcgcttgatgcttttattggcattcaggcaatgagctacaatgaccgttatttcaatcgaattcataaaggctttggtcaggttcaggacaccttagaatcctactttgattaaataaataattaaaaaatcaatttacgagaaagatctatttacacaaaagatttgacagtttcctccttatattaaaaataattaaattaataatactatatttatgtatttgttcaatattttttaatactttacttaaattactgcaaaattaaaagggatcgctcccttttaattagtctacataagcatatttatatgaccattgcgtaccagcagtattatgaatgatgccgtgaactcgcttgttttgcaagtaagctgtggtctgttgataaatcggtgtaatagcctgattactatttacaatcttagctgccgaaatcagatcattccagcgtatgtcaggattattggcgtcttgattgccagcttttttaaccaaattatcgtactcagaatttgaccacttaccgtaattgtaagacgtacctgtcattggaatttgcataaatgtcatcgggtcgttgaagtcgccaccccaatgagagagataaatgtcaaagttgccttgatgtgctcgactggtggttgacttatcaggaatattggtaatatttatcttgattcccttcaattctttggtccattgtgactgcaaatattgggtcaattgatcactgtctgcttcatcatttgaagataaaacatcaaaagtcaaactcttttggccaatctcctgtaatcccttttgccaatatttcttggctagagctggattataatcaactgtatttttcactgcttgttctttagcaaaatctatacctgttttaggatttgcagccaaatcattggcaacaaagccttttggcagagttgagccattgcctaaaacctttttagtcacaatatcacgatcaattgataatgataaagccaagcgaatatttttattattcaaggcctttctattaactgcatttttatccttaaaattataaagcaagaaacgcactaacgaatatggatattgagtaaagtcattattgctcttcaagtttttaacttgctcacttgaaagtggagttaaatccaatttgccctgttgatacaactgataaccagtattgttagacttaactacttgatagtgaatcttgttcaacttgactaccttcttgtcccagtaatcattattcttaacaaatgaccaggtatcattagttccattccatcctttaatcttgaaaggacctgagtagacttggtactgagccttggttgcgtatctattgccatactttttcacaactttttcgttttgcggcccaaatagtggataagccatcaatactctaaagtaagcgatcgggcgatttaacttaaccactaccgtctttttatccggtgcagaaattcctaatgcattaggtgatttctttcctgcaatgattgcgtcagcattcttcacgccactaaaaagataggcatacggagaagcggtcttaggattcaagcttcttttccaagaataaacaaagtcctgcgctacaatcggatcaccattggaccacttagaatcacgtatcttaaacgtccaggtcttaccatctttagatacggtcccagttttagctaagccggctgttggcttaccatttttaccaagacgataaaaactttcgaatacattgccagtttgaccaaatccggtagacttactgatatcaatagtatctagtggagctgtggtgcttaaatttaaagtgccactttgagctgccgacttactactgctattgccattaccacatgctgcaagaagcattcctaatgaaatagtaacgactcctgctaaaactccctttagtttcgacataaattttcctttctcaaacaaaaaaatgggatgtactccaacacggaatacatcccattaagaaccacaactttttaactagttaatcagtaatagtcttaagatgaatcaccacatcagagcatgtcaaataaatgctgtttgtacaacaacattcagtgtattgacattgcatttgacgcttaaacatgtgattcatcatccttcttacttttgataagaataatcataatttattcgatcacgattgtcaacaaaaatctattgtataattatagaaaaatatttggagaaatttttatggaaattataaaatatggtccttacactcttttcacacttattagaacaatcctaacatttatcgtggctattgagcatatcggtatctgtttcttagaaatgtttggtaaacctgaacaacaagctaaggcttttgacatggatatcaattttgttaaacaagaagctgctcaagtttcactagctaaccaaggcatctacaatggtatgttaggtgtaattttgatcattgctttctttattttccctatccctattctttttaacgtatggaaattaattctaagtttaattgtcgtagtagcaatttacggcggattcactgcaactaagaaaatctttttagtacaaatgctacccgcacttttagcattaatttttcttttcatttaaaaatattgcatttttgtagcaaaaaacataagaaaattcaaagctcctagtgataagctatcaccttgtgattatgtaatatataatatcagtaaacatatagaacataataacgaggtggaattcatgagaaaattttttatcattatcagcagcattattactgggttacttattgggataattggggcaacgatctatctaaatagtcaatcgtcaaaggtaagtaactttaccattcgaactactaatttaacagctcaaccgaaaatgatcagctattctagcaataacctgccacagattaatctctcacaggattccgccgttcagaaattcaaatcattatatacacatgcagtaggtcaactaccttagactgaagtctagggtttagtggcttgttagcttgcgctaaccagaacaccaacttgcttagatacggatttgacttaccagcagtaatcttttgactattgccgatagaggtcgtctaattaccaaagccttttaagtccgcgagttgctagcggactgcagcttttctaggctgcttcttttattttaggattctgccacttgcctaatcctttttctaagatgttcacggccgcattccaatcacgaatatgatgcatctgacagattgggcaagtccattcccgatccttaagggttaatttcttataaccgttttggcccataatactgccacattgatggcatctttgggtggtgtacttaggatcaattgttagaaattctttgccatatagatatgccttataagccagcatgttcaggaaactacgccaaccaacatcagaaatagcttgagacaaggcatgattcttaagcaggtttttgctccttaattcctcggcaactactaaatcgtggtttttgattaatgcagttgagagaacttgtaagaagtcttcacgctgtctgcgaatcttgtcgtgcagtctggcaactgataagcgctgcttttgatagttttttgctagccgcaaattgcgtccttcttttttagcccggcgctgcctgcgagataatactcgttgagcacgagccagcttctttttggctttgcggtaaaagcgtggattagcgaccattgatccatttgaatccgttaagaaattatcaaggttgagatctattccaagttgactctgcgtcttaggcaaggctttaacaaaggcaatatcgctgcctaactgcattgataagtagaattgctcgtcagcggtcttttttatcgtcactgtcccaattctagttgagatatgattaagcaagcgctctttaatcagttttctaaaaccagcaatgcggacaacgcctagcttaggcaatttaatatgcttagcatcaataaacctagctgtcccgttatcaagaaaagcttctggctgcttaggatattgacagttggtctgatatgaccagtcgctgcgttttttatggaaagttgggattccatgaccaatcttacgatagttgttccaagccttctgataattttgaatggcattggcaagagcgaggctatcaatttctttaacacgcaaaaagctataagtatcgcggatattctttggcttagccaatagttcgctattagtgactacttcttctgccaacctagtctcataattattaagaatagaaaaggcaaaaggcattgcttgatattgtctaacagctaagtagcccttagcatgataattacttcgattacgtcctacataagagttgtagacaaagcgctgcgcatcatagtttagcttaatgattttcttttgcttagaactaggataaaagcgaagcttaacgccaaaatgataggctaaactgctcatttttttcatgtgtttcacctcctcgtattatataaattgtaattagtcatattgtgataattaatcaaattagtatttgctttttgatcttcacatgttagcctctaattgtcattggctttggtcaactggtctaggttatcacctcctgcagttttgtctgctttataagtctgccacccagacagttcctttatgctctaactcacatgctgtattgattgcttctttttgctagtccttgagcaattgggattaggtgcagctttcaaagaagcaaccagtgaatacttatactggcgagattgaacttaagaactgtaattaggggttaacatgtgaagatcaaaatctatgatcagaaatttgaaagaaaggaggccatttccaatgaaattatttgtcggtattgatgttagttctaaagatttacaggtcgttgcacttgattcagaagatcaaaacaaacgcttaattaacgatagctttgtcaatgatctttatggtgctagtgaactgaaaaaacaaattttagatctagctcaaaataaacactatgatcaaatcattattggcatggaagctacatctatttacagttttcatcctgcttactttttccaaaatgacgaagatttacaaaagctcaatgtagagactgatgtaattaaccccaaagaaaccagcaggtttcataaagtctttgaagaaagtaaaactgatcctctcgatgcttattacattgctttgtatctaagctttggacattatcgagtaagcattgccagacaagacaactatcttgctttagagcgtttaacgcgtaccagatatgaattagttcaagaactgactcgtaccaaacagcacttcattgaagctttatattatcgggttaataaactaatcactgtcgataaagataagattaatactcctcttttcggtgctacaatgatgtctattgtaaccgatagtaaaactctggatgagatcgcggatatgcctaccgaagacttaatttcttacttacaggttaaaggcagaggacgcttttccgatccagataccttggctaaagcaattaagaaagctgttagaggttcatatcgcttaggcaaagtaatgactgattcaattgatgcagtgctttctgttcattacaacatgattcaaagctttaatgaatctattaaagatctagaaaaagcaattgatcgtatcgttgatgcattaccagaaagcaaaattctggaatcaattcccggtattggcaaaacctatacagctggtattatcgctgagatcggaagtatcgatcgctttgataaagaagaacagctggctaagtatgccggcctaacctggaatcaatatcaatcgggagatcacagcaacgaacatactccaatggccaggactggaaacagatatctaagatattacttgattgaagctgccaatctagcaagattacatgatcctgttttcaaaaaatattaccaaaagaagtatgatgaagctgtctactcgccgcataaacgtgcttgcacattaactgcaagaaaattagtacgagttatctttaaattgctcaaagatgacaaactgtacaggacaccgaggtcttaatttcaaaaattggtctaaatttaaaagtaaacaaaagtttaacattaaaaaaatcaacctttaccaaggcttagtttcatatactcaaatttatgatcaaaaagaacaaatatcatcgcctttcatttgacttattaccacatgactcatagattagatatttatattttacagggaagtcgaacatatgtctctattttttaataaaaaagctgactgctaggtcagcttggtcctatccatccccacattaaaatacggggattttcgggcgtttttcattaaatcgatcacacttagtttaagtaaagatatctatgtttatgacatagtaggctatgatgaccgtaaagactgtactattcaagttgacgcaactaataacaagattctaggtcagtctacgcaggtgcttgattatgactacgaaaaagatgcgtctttgaacctaaaaaagacaatttcacgccaagaagctaatgaaattgccctaaaagaattcagtggaggaacaccgatttcatgggaattaactgatgacaataatcaatcaatttgggaagttaaaatgatccacggtaaacacaaacataccgtaaaaattaatgctagaacaaaggctgtaatctaaaataatccccaacttatgcacaagttgaggattattttcttatcttttatctaggttgactatctgcacgtgacttgtaatcaccgttttcagtaccaataattagcttttcgccattcttgataaaatcaggaacttgcacaactaagccagtttccatagtagcaggtttaccaccaccagctacagttgcacccttaatctctggttgtgtttccttaacggtcatttcaacagttgatggcaattcaataccgataatcttgttatcatctgtaaagtccatatcaaccataatgttaggcatcaagaacttaacgtcatcacccaattgatcagctgaaacttcatattgatcataagtatcagtatccatgaaagtataagtattaccttcgccgtaaaggtattgagcctttttcttagttacttcaactaaatccactttttcagttggacgcatggtcttgtggacaactgcaccactcttaacgtcacgcaaatccatttgcataacggtattacccttacctggcttatggtggttagcctttaaaactttgatcaatttgccatcttggctaaaaatcataccttttttcaaattaattgcttgtaccattatttcttctccctttaatttaaacttacctttcgactagtttaaacacgctggaggcaaagcaaatttttttatcaacagtaaataaatcgtattcataatacctagtataccaaattagatgtgccgcaggtatatccgatcaatcaaatgtccgtcagtcttatgcaaaatcaggctagcacgttccttggttggcgcaatatattcacgcaagttgaccagattaaccatctgccaggtttcttcagccaattgaattgcatcttccagcggtccattagccattttatagtaaaaattatctggcttatttttatttaatttaagtacttttctaaagcgttgcatgtaccatttttcaatcaaatcttcttcagcgtcaatataaattgaaaaatcgaaaaagtcactagtcacaacttgtccactctcgggcaattgcaatgtattaattccttcaataatcaatacatcaggattttttacatgaccatatttcccaggtactatatcgcttaattcttgagaatatagtggataaacgatatccttctttccacttaaaacgtctcgtaaaaaatcactgagcaaagtcatattgtaactttcaggaaagcctttgcgaggcattaaattacgccgctttaattcctcattagggtaaataaaaccatccgtggtcatcaagtgtacctttaattctggataggttctactgagcaacaattgtaataaacgcgcagtggttgatttgccaaccgcaaccgaacccgaaataccgatgataaacggagctggtgaaaaacttttatgcaaaaatttgatttgtgctttttgcgcattctttttttgttggtaaactaagtgtaagtaactgatcaaactggtatagatctcatgcacgtcggttaggtcaatcacgtctcctaaagacttgatatcagctaattcttctttggtaatattgactttatctaagggagctaatttagcccattcatttctgttaaaactcgtataatttctcatatatcgtatccatattccttctaaaacactaacttattataatagaaagcgctaaaaatatgaaaaaaataatcctattcggcgattccatttttaacggatatcgtaatggtcaaaatacaaacctagtaactaatttatttcaacaggcactaattaattatgcacaggtggaaaacatttctaaaagcggtgctaccacagttgaaggcgtcgattatttggagcaaatttccccagaacatgatctagttgttgttgaatacggcaataacgatgccgcaacagcttggggcattagtccagaaagctacgaaaagaacttggctcaaatccttagtgcagtaggcaaagccattgttgtgggattgtgcaatcccaatccagaaagtgacatttttcaatattatggtgctgaaagactcgatctttttaacaatatcgcccaaaaagtcgcaaaggcacatggtgcacaatttgtggatattttacctgcaatgagaaacttaaaagacaaatcgacatattatcaagccgacgggcaacatttaactgatcaaggaaatgagtttttagttaatcaaatcgtgccagtaatcaaaaaagacttagcctaagccaagtccctcttcatcatcacatgttctacgccgccttcatcaaacggttcgcctacaacttgatagcccaagctatcatagaaaggctttacccgcatttgggcgtgacagtaaactgcatcaatcttattttgccgtaaaaatttatgcacagctgtaatcattttcgatcctagctgttgtccgcgcgcttcttttgacacagcaacgcgtcctagcatccatttaccatcttcttgaaacagacgacaagtcgctaaggcagtcgtctgtttttgattgagtaaataaacctgaacagcaattaggtcctcatcatctaaatctggtagagttatcttctgttcagccacaaaagtcgtgttgcgcaatctttctacgcaatagaattctctagctgtcatttcatcaatctttttaaaagtaaaattatctatcttcatattacttgcctaaccaactattgtttctgccaaaccatttttcattaagtttacgcaattgaccatttttttgcaattttgctaaaccttgattgaccttctgacgcaaagttttgtctcccttacgcatccccacagcgaacaagtccattggcacgcgatcattctgaattaccttgtattcgctacttttagccatgtgagcaatataatagtcggcataaacttcatctaacagaattccttgaattcgtcctgcattcagatccaagaacgaattagaaatcgtatcatataaaactgttttcttagcatgcagcacatcttgtttagtttcataccactgctctgctgttgaaccagtttgcattcctaattcataattcttcatttgtttaaatgaactaatgtcactatcttttttcacaactaaaacctggcgattacgtaaatatggcttgctaaaagctacttttttctgtcgttctggcgtaatgctgtaaccattccagagtaagtctatcgtaccgttacgcagctctgtaacgttcattgaccaatcaatcgtttgaaaagaaaccttaatgccatattgtttaaagactgccttagctaagtcgatgtcataacccgtcaattggccgtttttcttttcaaagcccattggtacaaaactatcgtctaagccaattaccacttgctttttgctggcaatcttattccatgtatcttgagtattagcttctttttgtacgctttggcaaccagttaaacataatgttaaggccaagacgatacctaaaatccattttttcattgcctaatcctcgcttaacggtcgaaccttgagcatctgatccgccacattctctgcaaaattcaagtcgtgggtgataatcagctgggttaaacccgatttttttaagcttaaaatcattttctcaacttccttacgtaaatttggatctagcgcgctagttggctcatcataacaaagaatccgcggtttcatagccaaagctctagcgatagctactcgctgtttctgcccacctgataactcataaggatactgctgttcacggccacttatttgtagacgttttaacaatacacgcgcatcctgctctgcttcagttttactcttttttaataccaaagtaggtgccaaagtgatattttgtaaaacgctcaaattaggaaaaagattataatcttggaaaacaacgccaaccttgcctgaatcataaggtttaccgtcaatcaaaatttcaccagaatcttttgtttccaaaccggcaataattcttagtaaggtggttttccccgctcctgatggacctacaattgtcataatttctccgtctttcaaggtaaaagagatgtcacgcaaaattcggtgaccgttaaattctttgctcaaattttttacttctaacatattctcacctcaactacttgtaataagaaaagtatttttccagctttttcaaaacaaaagcacaaatactgatcaacagtagataaattacacctactaaaactaacggtactagcgttacgtctctggccattgccacattgccggccctaagcaaatcacctaaaccaatgacataaactagcgatgaatcctttaccaagttaattacttcatttccaattgaaggcaaaacaatttttattacctggggaataataatcttggtcatcgtttgccagcggctcaagcgcaaaactttcgctgcttcaaactggccttcatcaatcgattggaagccgccacgaaaaatttccgcaaaataagccgcataattcaaaacaaaagcaaacaaggctgcttgatagcggggaaagacgatatgaataattggtaagccataaaagacaaagatcaattgcaataataagggcgtgccccgcataatccaaacataaaagttaaccaaccagcgtaatggtttaaacttacttttttcacctaatgagaccaaaattcctaatggcgttgctaaaattaacgtccagaaaaaaatacttaacgtcatgcctgctcctgacaaaagagcgggtaaaatttctgcaatatattttaatgacatactctcaccttcatttttctttcctaataaaaaagccctcttaggattaacctaagaggacgactgctcgtgattccacctcatgttcgcacctgctcacgcagaaatgcctcactaggttgatcattttaaaagaaaaaccctcatagccaaacggctacgagggcgaatgtaatcgcggttccacctcatgtttacaaattgctcacgcaacttgcctcaataagttcaataatcaacctttagctataacgggctatcccggattttcctacttttgttcagaagaccaactcacagatgtgattcatactagcaaatatcttatttccaccagcaaagactctctattactttgactagtattactatttctgttctaagttgtttttaatgttgaataaatcttaaatgatctagcaacttttgtcaattatttttcttcataagtatctggatcaacatcaagcaatggactcttttctccagtataaataatatctagcttatacattgcacgagaggtaatagtataaacaagttgagtttcatccaatttatggtaagcagctttagaggcatcccacatgactaccgcatcaaattctagtcccttagccaagtaagaaggcacaactagagtaccatcaactagtcgctgattagcagtcgcaattaaggtcgtgttttcaccttttttagctaattcttcatgcacaaatttagctgcagctaagtctttggtaataacagctgtcgtacgcttattttgttcattattatgcaaaacgttaactaaaacatcaattgcttcatcatcgttttttctgccccaaattataggcttaggacctttacggttaaaggcttcaatcttttcgccttgacgcaaaatttgcttggtgaaattggtcaattccttagttgaacgatatgatttcgttaattgcaccacatcagttttttcaggatcaaataagccagagatctgcttaagtaagctacgactttcatccttagtaaaaatagcctgattcaagtcacccaacattgtaaacttggcccgtgggaaattatacttcaagtaagctaattgaaatggagtataatcttgaatttcgtcaatgaaggcataacgcatctcaaagtcagtcctgcgaccagtgatcatgtcatacaaatataagtaagctgaaacatcattcatggcaatatggtgctgcttaaagttattcttaacttcttccacatgagccaaccaatcattttcatcaatattccacttagatagatcaaccatcttaggtacagctcgcaaaaagctcaggtattgtgctcgcatattcaaaaagtggttgtgcaaaatacgcttatgcacgcccttcaaggctgataatacaatttttctacctaaaaaggcctcttccttagcctcagactcaaattcttgatcaggtcgatcatataactcatttaattcagattggctcattccttcaatagcgtgtgccacccaagccttcttagtttctggcgtaatctttcgattcaacatcttgatcaattcttcacgcgttgcatcaattcggttggccaacttgtaattttcattgaaagaataatagatctccttaattttttccttatcaaagtaaggtttcttcttatcacggaaataaatattcttaaaaataacaccgcgcttattcaagtgctctgcataacgagtcaacaagttaaagaaattaactgaatccttaaacttagaaatattgctgtctgcggtttgatcttcaaactgtctgaataagttttcaacttccatacctggcaaccgtcgcgcaacaaactgccagtaagtcatttgaaccatattttgttcgcccatttcaggcaaaacattcttaatatagtcattaaacaactggttaggactgaacatgattacatcacttgaagtcaggttgccacgataacgataaagcaaaaaggctatccgctgcaaaatcgcactggttttaccagaacctgccgcaccctggacaaaaagcagatctgctttggtgtttcgaataatcttattttgttcgcgttgaatcgtcgttacgattgacttcatctgcgttgatgatttttctgacaaaacttccaagagcatttgatcaccgattgactcatcagtgtcaaacatgttcacaatcttgccatcttcaatcataaattggcgtttcttagtcatatcaactgtaatttcaccttcaggcgaattataagaaactttacccaatttaccatcataataaattgaagatattggtgcccgccagtcatagatcaagaagtgatcgtccttgtctgcaaaagaacctagaccaatataaatcgtctctgttcggtcctcatttttttctttaaaatcaacccgagcaaaatatggtcgcttctctaaacgctctacagtctctagctgcttagctgaatgttgccaagcatgttcacgttcactcaataattgttgctgctggtggattgacagtgctgtttccattgaagtggaataaccatcataatccaatttaacatcgtcaaaaaagtgtgaattaagctctcttgcttcgccttcagctgatttgatagatttttttaaagttttttcgcggtccttgatctgacccataatattatcaaggtgcttttgttcaagttctttttcgtttttttcagttttggctgtagccatctaatcaccttttctttaaaaattcgcataccattttaccatgaatagcgctttcataatagttttcctgctcgtgagaaaaatataaataaaaattgatgaaaactttaactttagagactataatcttgacatattggggtgatatatacatgaaaagattttttaaattactgagaaatgttctcttgcttgctcttatcgctcttggcgtttggacttatcagaacaatcccaatattcgtatcgcaacgcaagactccctagctacacttagctatcgaattaacgaacttctaactaacgaaacgaccatttctcccaataacgaaaaaaagactactaatatcaaaactgacacagataaaacagaaaatgacgattcttcagacaatcgtgtatggtcaaatcctgaagctaaggtttatatcgatattagcaataatgctcaactaagatcagctgcagtcaatgcaatgaacgcttggaatcgtaccggtgcttttacttttcaccaaataaatgataaaaaagacgctcaaatcgtcattaatacagtcgataatagcgacactaatgccgcaggagaaacagcaactacctataaccctgctacaggacatttgttaaaggccacggtcaacttgaaccgttactatttgcaaaacgaatggtatggttacagttacaatcgaatcgttaatactgctgaacacgaattaggccacgcaattggcttaaaccacactaataatgtctcagtcatgtacccaaagggttcgatctatacgattcaaccgcaagatattaaaactgttaaaaagatctaccacgaaaataattaactttaaaagctcacctcttttttctacaataaagtgtgagctttttacgaggagaaaaatatgaaaagaatttatatcgtccgtcacggtcaaacttatatcaatcgctacaataagatgcaaggttggtgtgacacaccattaactacaccaggaattgaaggcgctgaagaagctggtaaagctttaagcgaagtaccttttgacattgcattgtctagtgatcttaagagagcaagtgatacctgtgagatcatcatgaaatataacgccaacaaagacgaattgcagcacatcgctagtccatttttcagagaacaattctacggctacttcgaaggaatggattccgaaatggcttggcgaatgattggtggcagtcacggctacggaacacggcaagaaatgtttgctcatgagagcatcgatactattaaggattggattaaagaagccgatccttatcaccaagcagaaaacgctgaagaatattgggctcgtcttgatgatggttttaaattaatcagtcaattggatggcgctgaaaacattctgctagttactcacggcttcactattagaagtctctggtatcgttatggtgaccatattcctttggttccaggtcctaagaatgcttcaatcactattatgacaatgagtgagaaaggcgaaattaagatacctaagtggaatttaatgcatttatagcaaaataagattaggcgaatcgggcctaatcttattttgtttgtttcccggatttaaaattgaagtgcaacactaagtgttaaacaaaaaggccatgaagacctaaacttgaagtgacgaaaaatcaagaaaggaagatcttcatgaccaattcaaattctagcatttctaagcactatcatcaattaaccagcgtacaacgtggacaaattcaagcaatgctggattccggcataacttcccgtactgttatcgctcaagaagttggctgccataagtcgacaatcagtcgcgaaatcaaacgcggaagcgtcctgcaaagagacagcagctatttattgtatgagcactattacgctgatactgcacagatttattatgagaagcgtcgcaaaaactgctatcagcgcaatccattgaagcattatgctgtctttttgagaatgctctccagacgctttaaagctaaatttgatgccaccagcatcgatgaattcgttggtgaattcaaaaggactatgccaggctacccttgtcccagcacaccaactgtctatcgctatattgatcagggcttgctggacataagcaatattgatctgcctatgaagctcaaaagacgcaggaacaagtgtcatcacggccatagcggtcatgctttgcacaagaagcatcttggcaattccattgaacagcgtcctaaagagattgaagacagaaaaacgccgctgcactgggaaggagatctggttaaaggcgtcagacgcaagaatcagcctgctttaatgactttgaccgaaagaaccacacgctttgaagtagttatcaagattcctgactatcgggcaagcacatgccaaaggctgcttcaaaatgagattgacagacatcctgcctggtttaaatcgatcacgtttgacaatggctctgagtttgcggatatgaccgagatcaaaggctgccagatctacttcgcccacccatattctccatgggaaagaggcaccaatgagaactgcaatggacttctgcgtcaattcttccctaaaggcaaaagcatgaaagataagtcagctgcttatgttcaacaggcaactgatgccattaaccgcaaacatcgtcgaatccttcaatatcacacagcagaagaactcttcaagcaatatatttcctcatagcctaactgttgcacttaatttgacaattcaggattttgtttgtttaattatttttgcaaaacaatatttttatatagcttcactgttattaaaaaacttcctgaaactgtcaaatcttttgtgtaaatagttctttctcgtaaattgattttttaattatttatttaatcaaagtaggattctaaggtgtcctgaacctgaccaaagcctttatgaattcgattgaaataacggtcattgtagctcattgcctgaataccaataaaagcatcaagcgactgttcagttggaaactctgccttaggcttagctttgcgcttgatcacattgttaaatgattcaatcatgttagtcgaataaattgaagctctgatctgcttgggatagttataaaagaccagcagatctggttctatgtctttcaagcttctgataacatggctgtaaaccttgccccatttggtatagaagtcatgcaggacagctgtggcttcttctttgtttgtctgttgatgcacctgtttgaattcgttcatgatcttttcacgatcgtcgacgcgtactttagcgcagatattgcgcatgacatgaaccaaacagcgttgaaaatgagctttaggataagtcctggccaaggctgttttcatgccaacaacaccatcagaaagaaagagttcaacttgcttcaagcctctggacttcatgttttgaagcatctctgtccagacttcaatgttctcactaggagcaatgcagtagtcaatgacttccttatgtccattaggtttaatgccaatggcaatatagactgcttcacgctcaaacgtttctcggcgcaaaggaaggtatgtcgcatccaaatagacgcagaaaaacttgtcgcttagcttgcgtttgtggtaagcctcaacctttggaatcatctgcttggaaatatttgatacctgagctggactgtaatggctgccatacatcttttcaattagatcggctatttccctggtggtcacgcccttggagtaaagcttgataatcatgctttccaagatatccgagtgctgcttgtagtcaggcagcgtgtgctgatgaaattgaccgttgcgatcccgaggcacttgcacttcaattgggccaaattgcgtatcaactttgcggaaataagcaccatttctagagttgccagtattccagccatttctggcatagggatcatagcccagaaaggcagtcaattcagcttctagcaagttattaacagcctgttgtagttctttgcgcaataaatcatttattttgtctggattgaatagagcttgagcaaaatctttggtaaaatcattcatgaaggagttcttctttctgtatgtgtttttttgttcaaaccaatcatacgagaaaggaactcctttttctaatgtttaaagaaataaatttaaggaatcattcatccttacacaaactattttacagtctcaacttcctactatttttaacagtaggaagtcttactctaactaatctttagtcacttgttttagtttttattaacttacagtcgcccaaagtctgaatcaattgtttgccatctttttggtggaaaacagcgttttgatacgacaatcgttctttctttttactcttatctttatactttttaataaaggttacttcatagttaatccgactataattacgcttacctggtaaaacagagagcaccttgatctttacacttaatttcttgatactcttctttttatgccattcctttagttgcttagcaatcttcttatagtctgcattttcttttccattttcaaagtcatctgcatttggcgacttaagggtgttgtacaatagcttagctgcatccccaaccttaatcaagccaggccaaatcgggttaacaatatagtcaccttctgcatcctgatagacatctttttcgccattgccttgatattcagcagtaccatcataatcagtgacgtcatcctcactattagaaaattctgaactaatcgactgcgacaaatccgttaccctttcggacttaatagtttgaccatctgccttactcttaatatagatttccattcgcttagcaatcggataatccttgaaagtatagctaccatgctggttcaatttacccgccttacgatcattgatatagatcgtaccattaggaacgctgcgcacttggaaagtggccgttttgatcttcatatcaacagtcttatctgaccaaatgttaacaatcgaatcagcatctaaatggcgaccattaaccttagatttaactaatatatgatagcgaccaggaaagaccatacctaaatcttgatagtaattctgattgccaccttccatttcaccataatccttttggttaaccgtcaaagttgaattagcgtgattggtcttcacctgtgggcgatatacttgtatccacaacttatattttggaaaaagcaaaaaattgcgtccatcttgaatcagtctgatttcaccatgatcgcgattatgacgcaaattataggctaaacgtttagctgcactgtgatgctctttaaagtaattttgaagcggcttcagcgatttatctgtcacatccatatcaggcgttgaagccgtgacatactgagctagctcagttttaggatcctgcattttagctacaatgcggtcaatttgacgttctttagtgtaataaaaattgccaattagccatgcaataccaattaacaggataataactcccgatatccaaattttcttatgttttttcattgatcaaaacaccttttcacaaatccttttaacttagattaacaagttgatcaaaaaaagcaaacatcttttgttcacaaatcaagacgaagttcttattatatttagtagcattattttattttggaggggattgcacagtggaagtaaattttgattttgtaaaaaatagcagcttcaaggaagcctttcctaccgctgaaaaaatccacaaattatacacaattgatgattatcgtgacgttatttcaaattcacgtcttctattagagagtctaatcaaaaaaatttttaagttagaaaatctcagtccatattacacagttcatgatggcgaacaccgtaatttgcgtaataatacacattatttacgcaatgaactagattaccctctttcgatcatggatttatttgacgaaatacgctgcatgggcaacgctgctgtccacgataaccaaattgaaccagatcaaaagcaagcctggcactgtatttgtgatttacacgatattcttgtctttttaattaacagctatgacggtcaagacctatattatttgcgtcccgatattgcgatggaagcacaaactgatgaagaccattattatgtgcgccaaaataagcaaccaaaaataatgaaattgcatgatcatcaaaatactaagaaaaaacagtccgcatctgcaccaaaaaaggcgaaacatgttaaacatttttccagtaaacagcatatagagcaaactaactctgagtcacaaacgaaaactactccttccactaaagacaattggttaagaaaaattaaagaactctttcaccatgattagtcatattgacactatgtcacaatatgataaactatatattatataatttacataccgagaagcgcctatgacgctgccgatacgcaaatgaaaactgaacaagtttctcaaatggggaacggcttatgctagtaggtcgttttccattatttttttacgaaaggagtggttagtccgctatggataatcacaggcaaaaaccttgggctgtcgaacagtctgaggtattaacaaatacaaaaacaaccgaaactggtttaactgaagacgaagttcgaatacgccagcaagctggtttaaacgagctcgcagctaaacctcttaaaacagtaatccaaatggtcaaagagcagatttttgatccaatgatcggtatcttattagtagctgccctcttatctgctatgtttggcgaatataccgaagccattattatcgcgacaatcgtggttcttaataccattattggagtagttcaggaaaagaaggcacagtcttctttagctgcgttatgtgacatatctgcgccaactgcccatgtaattcgtaatggcaaagaattaatcataccggccaaggaattagtagttggtgatattgttaccttgcatgatggggacatggttccagccgattttcgcttaattgaaacagctaacttgaaaattcaagaagcatcccttactggtgaatcagtaccggtagaaaaagacgcagctgctgttttaaattcagattgtgctcttggtgaccgcatcaatatggctttttcttcctcaattgtgacttatggtcgtggtcaaggcgtcgtgacagcaattgggatgcaaacagaaatgggtgccattgctggcatgttagaagatcaaactgaagtacaaacaccattgaaacgcaaattagctaaagccggcatggtcttaacgactatcggcttaattatttgtagtttggtctttgcaattggtgctttctatggccgtccacttttaccacaattcttggttgctatctcattggcaatttcaattattccagaaggtctgccagcaaccgcgacaattgttatggccttaggcgttaaacgcatggttaagcgtaacgctttgatcaaaaagctgccagcagtcgaaaccttaggtaacgccactgtcatctgttccgacaaaactggtactttaaccttaaacaaaatgactgttacacaggcagcaacgaatgacttcagccaaagtcacgtagttgaccagcttgcagcaaacaaaaccaatcaaactttggcctatgctagcgctctttgtaacgatgccagcttgaacggtgaaaaagagattggtgatccaactgaggtagccttaattccttttgcccaaaagcttggctttaaccaatctaacttaaagaaagaattcccccgtttgttcgaacaaccctttgattcggacagaaaacggatgacaacattgcacaaaattgacggtcaattaacggtcttcactaagggtgcaacggacgaaatgttgccgttatgtacacacattatgactgacaatggcgtgcgtaaaattacaccccaagacaaaaagcaaattgcccacttgtctcaccaaatgcaagctgacgctttacgagtactaggctttgctaccaaaatagtggataacttacctgaagcaaatgctgatttggaaaataatttgacttttatcgggattgtcggcatgattgacccaccacgaaaagaagttgcagcatcagttaaaacctgccgtgaagccggtattcgcacaattatgattaccggtgaccacaaggtaactgccttggcaattgcgaaaaagttaaacatttatcagacaggtgacttagcaatctcgggaactgaattagaccaaatgtctgatgcagaattagatcaagctgttgaaaaggctaccgtttttgctcgcgtttctcctgctgacaaactgcgcatcattcaaagcttaaagcgaaattgtgaggtaacagctatgaccggtgacggagtaaacgattcacctgccttaaaggctgccgatatcggtgtcgctatgggtgtaacgggtacagacgtggctaaggacgtggctgatatgattttgcttgatgatagttttaccacaattgcgcacgctatcaaggaaggtcgccgcgtttaccgcaacatccaaaaagtaattcagttcttgctagttggtaacattgctgaaattaccactttgtttgcggcaactatttttaactgggatgcgccattattggcagtacacatcttgtgggttaacttagctacagctactctacctgcccttgctcttggcgtagacccagcaagtaaaaacattatgaaacacaagccagttaaagctggtactttattcgaaaaagacctagttattcgggttattacccaaggaatatttgttgccctgcttactttaactggttacttcattggtaaagaaaccggcaatcaagttgttggacaaaccatggccttcagtattttagcattggcccaaatgattcgttcatttaaccagcattcaaatactgatcccatctggaaaagatcatctggtaataatccatggttaacagtgtcattcattatctctgcatttttcatgggtattattctctttgtcccagcaatgcaagatgcatttcacattaccagtttgtcagctggacaatggttaatcgtagttaccctagctttactttcaattgcacaagttgagttagtaaaaggttgggcaaagtttagaaatatttttattaatgacaataatttaattgaagattaattagttacaaaaagacggtagtacaacactatcgtcttttttgatattaaactttggctgctgccaattggtcaacatctatctgactacgaccaatctgaattgccttttcggtactttcattcaagctagcattgatcatcttatggctaagctccagcaccattggcaaattaacaccgctaattacccgtactcgctcaggatacatatcttcatattccgaagcgactaagtggggtgtcccattttttaaatcagttagcaccaaaatctgactattctgatatttattcatgactttagcaaaacgagccttaaaatctctgattcctgtgtcgtttaattcaattgtcaggatctgatcattcttgcctgccaacatatcatgtgcagacattagccccgcagccaacccttcatgagttgcaattaaaagttccataaaacgcacctctttgtaagcgatttctatagaaccattttaacatatttttgtattaattaagctgttcaatatctgctaataagctactttgttcaggtgttagccgctcatccttttgccgtaacttaagtacttgtagacaagtgtgcaaaatcttttttccttgttccgtcacttgtttgccatccatatcaggcgttacactggctaaaaagtcatccatctcatcagcagtaaccttgaaaacatcattttctccatgaatcaagggcatccgattgagcatttcttcaatcatttgtaatttatttctagcttcttcaaaatctatcttgttcacatccaattctttttcttttattatacaaaaaaacagccacctaagtgactgtcatctttatttcgtattaataattgcgtttgaaattgtagttgcattagattcgatcagttgatgtgaattattaataaaaagggaagccccaattcctatagcagcaaatacaagccaaactttctgtaaaactgtactcttcatgttcccagctccttatatttcttattatataaaaagccgatcgttatggggatggctacgcttacaattaacataattgtaatattatttacctttacttaagagttacttctccagcaacatttgtatcaaaaaagtcagcaatttgatggacgtccatcccttgccctaaagcccacattaatttggtaatcgcactctcagaagtcatatcacaagcagaaatagctccttccagtaaagcctcacgccccacctcatatttggtcaaatcgctacgttcatacaagcattgactgctggctacaacgggaataccttgacgaattagcataccaattgcggctaccatgttgcggcgaataaagttcatcccgcctagaccatatgcttcaataacaattccacggcaaccactattaaccatcgcaaaaagcagattaggatcaaagcctggaaatagtttcaccaacgatacgtgtgaattaattttggtattcaaggttggctgaccgtcatgttctctttgaaaatgttctgaattaaaaactaatccatcggaagaaacggttgctactggtggcacattcacactttcaaaagcatcaaagttggtagtccgcacctttacactgcggcagcccagcataactttattatgaaaggctaaataaacatcaggtggacaagttgctgcagctgcaaaagccaaccgtaggttatcgtgagcgtcacttaggaccacgttaattggtacctgacttcccgtcagcacaaccgggatattaatatttttcagcataaacgacaacattgatgccgtataagccatagtatcagtaccgtgtgaaacaacaattccatcgtaatcattgcggtatttgtagatattttctgcaataaatttccattcttctggttggatattagaagaatctaattgcaaaatatcgcggacttgaatgtcgtacggcaactttcccaacattttaattaactcttcaccggtttccttgggtactaggcctgcatcagaagcaacggaagcaatagttcccccagttgatagcaataatattttcttcatcttgttcccctttatctcaaatcacaatgtcgaccataactattcatgattagatcaattaaaacataggccgaactaaaagttaccgcattttgcttactaaattgaaattgcgtagttttgaagaaaaagctatagtcgctaagagaggctaattttcccgtttgccagctagtcagtgacaccaatttcagttcagtattcacgacatcaatcttcttaagttcttcaataattgttttattaaaaccaccaaatgaaataacaaacagcatgtcattttcccgtgcagaccgccctaataatgccacttcgtcgcgtgcactaggcaaaataattgcttttttaccaattaagaaaaagttatgcgccaaatattccgcgataatttgctgctgccagccagtagagtaaagatagatcgtttccgcttgatctaaatccgcaaaaaatggttgtaagtttaatcccttaaaatatttaaaagtttcagcaatgatcttttgtaaatccgtattgaaatctagcgtttgcttgttcttaacgttttgctcctttcgtgtagctaactcggacaattcaaatttcaattcgctgaaaccgcttaatcccaattttttgcttaggcgaaaaatagcggacttagaaacgtataatttctgagctaattccagcaaactcaactgacttgctacttcaggatatttcaataaatagctaacgatcgctttatcggtctcattaaaactttcctttttcttcatgaccgctgtttctaaatccattctgtttcctttctcatcactgtttcttattaagaaaagaatatcatgtcgtactcaaaaaaggtagccaccctatttgagtaactaccttaatttttattcttgaattgaagttatgttatgacaattaattatttaagttctggccagtatggagcattaactggaatcatgtcatccaaaatcttcttagcaacggaagcatctggtacagtcttgtttaatgcaaatgcttgcagcatcttattgtatgaatgttcaacataagcatcaacaaccaatttttcacaagtttgttgttccatcatcaagcctctttggaagcgacctgctttacccgtagccattggttgaatgccatcagcaccaaacaatgctggtacttcaacaattgaatctggatccatattagaaattgcaccgttattagcacagttagctaagaacttttcatgagtgttaaatgcgatcgcatgacaaatatctacgatatattcagagtgcaaacctgaaatatcccaaatattattcttagcagttcccacctttacgattctttcacattcgccaaagacaatcttttgccggtgttcacgaatttcatcagtacgagtatgcttcggatcagcattagcaacttcatattgtgggaagtagtagtattgcatgtaattgtttggcaaagtttctggctctagcttatattcatcggcaactttcttaaaggtggcttcccaagaagcttcagtatccttgtcgtaatcgccacctacccaatagccgtgctctttgacatattccttcaacttaggcattaagtcttcgccagtcttcttgttgcgaacttctttccaccagccaaaatgattcaaaccataatagttaaagtcaatatcatgccaactgtccaaaccacaaatggcagccattctgtccatatcatcaatcggcatatcacaaatgttaattaccttagcatttggacgaagacgacggcaagcttctgcaacgattgcaattgtgttggagtagttgatcatccaagcatttggtgagtattcttccatccaatcaataatttgcaaaattgcgggaattgagcgaagaccataggccattcctccgggtccagtagtttcttgaccattcacgccatattttaatggaatcttttcatccaagcttctcatgtgatatttaccaacacgaattgatcccataacaaaatctacatcagtaaaggcctctttaggatcagttgtgtaagaaaacttaatttgaggtgctctttccttcatgataatttcaacagctttggcaatcttttcttgccgttcagcatcgttatcatagaacttcaactgtcttaatgggaatttatcctgactcttgattaaatcaaggacaaatcctggagtaaaagtactaccaccgccagcaataactactgaatatttcttaccatccataatctattttctcctttaaataaaactaagtttttatctctgtttcatttgccttacgcatatatttatatcatcttctcccacaaatgtattcgttttcaccagcttcagactttgtttcaagttttggaacgcgtttcactacgcgaaatatttttaaattttgccttaagcctaacaaatcaggtgtttaacttgcctttattagtaatagtgtaaaaatgaaaaaaataatcgtttcatgaccaagataaactataatttgaacattcctttaaccacaaaaataaatagtccgtatttgatgatcgtatagttttaatgaaactgtcaaatcttttgtgtaaatagatctttctcgtaaattgattttttaattatttatttaatcaaagtaggattctaaggtgtcctgaacctgaccaaagcctttatgaattcgattgaaataacggtcattgtagctcattgcctgaataccaataaaagcatcaagcgactgttcagttggaaactctgccttaggcttagctttgcgcttgatcacattgttaaatgattcaatcatgttagtcgaataaattgaagctctgatctgcttgggatagttataaaagaccagcagatctggttctatgtctttcaagcttctgataacatggctgtaaaccttgccccatttggtatagaagtcatgcaggacagctgtggcttcttctttgtttgtctgttgatgcacctgtttgaattcgttcatgatcttttcacgatcgtcgacgcgtactttagcgcagatattgcgcatgacatgaaccaaacagcgttgaaaatgagctttaggataagtcctggccaaggctgttttcatgccaacaacaccatcagaaagaaaaagctcaacttgctttaagcctcgggatttcatgttttgaagcatatctgtccagacttcaatgttctcgctaggcgcaatgcagtagtcaatgacctccttgtgcccattaggcttgatgccaatggcaatatagactgcttcgcgctcaaatgtttctcggcgcaaaggaaggtatgtcgcatccaaatagacgcagaaaaacttgtcgcttagcttgcgtttgtggtaagcctcaacctttggaatcatctgcttggaaatatttgatacctgagctggactgtaatggctgccatacatcttttcaattagatcggctatttccctggtggtcacgcccttggagtaaagcttgataatcatgctttccaagatatccgagtgctgcttgtagtcaggcagcgtgtgatgatgaaattgaccgttgcgatcccgaggcacttgcacttcaattgggccaaattgcgtatgaactttgcggaaataagcaccatttctagagttgccagtattccagccatttctggcatagggatcatagcccagaaaggcagtcaattcagcttctaacaagttattaacagcctgttgtagctctttgcgcaataaatcatttattttgtctggattgaatagagcttgagcaaaatctttggtaaaatcattcatgaaggagttcttctttctgtatgtgtttttttgttcaaaccaatcatacgagaaaggaactcctttttctaatgtttaaagaaataaatttaaggaatcattcatccttacacaaactattttacagtctcataatatatttttctttacttggctctggaacaactataaaatcacttttttctattttaagtaaatcctcatcctctatattttctatttttttcttaatccagatagataatcctgtatcattattttttcttcgatcatttaacccatctataaatcttctaagatcattatttgcatgacttaaataaatacaataattaggttcattagaaggcagcttatgcactacttcctttacctttccaatagcttcaacgtcagacttaacttgtcctgaaataaccctatttttatcttcattcaacactttaaaatcatttttgttttctggttgaactcctacaaaacctggtgtcatatagttttgtaaaaatgcatccaaagttgcatagtcctgatattcaaagcccttagaagcagttactccaccttgtcctttatttggcaatatccatctctcctttatagtatttttatgaaaccattattgttaatttcgacacaacttttttctgttaaaataaatatttgctattttttcattatacataatctttacgtccaaaagcatatcaaaaataccgactatagtttaaattctctcctaaatcccacttaacttcaatcaatctacgatgaggcaccccagaatttcatttagcctagcgcacattatgaagccaagttccttactctgttccaacaactcacgcaaatccttttcagtctttacataagatgcattttcactcaaagcaacaaaatcatcaacaattttcttcaccatctcttgtcactcttcctcattattcatcgccattagtcttccttttaaaaaatctgcttcaactcaggaatctcttcaagtaatctatcacacccattaaccatattctttactattcaatgattgcggtcaaccttactatgaccaaatgtctccaaaacaaaaagccagcatttgcgctggccatctttgattataaaaggttgttcttcaatattatgcaacactacgttactgttaacttaacttttgtgccaatttcaaaatatacttgcgcagatcttccttggtttcaggatggttcaagccatattcaatcgaggtttcgagataaccttccttgttaccaacatcatgccgcttttccttgaacacatgggcaaatcgtcttgttcaatgtatcaattgcatcagtcaactgaacttctccacctcgaccgggcttggtttcagccaaaatatcaaaaatttctggcgttaataaataacgaccaatgatcactagatcacttggtgctttatcaatagctggcttttcaacaaaattcttcacattataaagactgtcgttgaccttgccatctggcgcaatgacaccatactttgaaacttccttgtgtgagaccttcattacagcaatgtagaagcatgagtctgctcatagtcattcatcaactgcttagttaatgggattttatcatccatgcagatcgtcgcctagcattacaacaaatggctcgcctgccacgaaactttttgctcgataaattgcatctcccagaccagccggatggggttgacgagtatagtacaaatttactcccaagtcagtaataccttgagtcagctttagcaattctaactttccagttttttcaagatcttgctctaattctggatttgagtcaaagtggttttcaatgacacgcttattctttccagtaacgatcaaaatatcttcaatcccagattttttagcctcttcaacaataaattgaatggttagtttaacatacaccagatgaaatatttgagatcgaatctatcaagcagcctaagtgttcaattcattattgcaattttcaatttttaatctttactattcaatatttaatttacgtctttaattggtggtattacaaatctattattcatatatgatggcttaaaatctaatttcttaaatttagtatcctctcttgagatcatttctcccatttcattaccagatacattgctattatttccgttaacaaaataatattgtgcatcttcaaacatatcctcttcttttgctcctttactaaactcacagaatcctaattcaccagctgaggttaaaaattttatgatcatattagtcagttttatttttgagctataatcattaggtattataaataattgctcattagacgaaaagcccgaatacgaataagtatctattacattttcgccgcaactatcagtataagtcagttttattgccaaattataaacaacattaggcgatatattaataatttgtattttagaatacttacttccattatcttgtaaaactttttttactatttgcgtatcatgtttacatgctaaagtaacgatttctttgtagttttttatagttgatgcggatttaacatcaaatctaggacgtttttcttcaatatcatttgcctttttaattttattttgatttttaacctgtgcaaaacctgctatcaccgcagcaatagtaccgaagccacctatccattcagcaacactgcctaatacctctccattagcattaatcattgcacctatcaatattccgaatcctaagcaaaaaagtgatactaatatcccatacacatatctatcatctatatttttttccttcttttgcattatttcatattcatccttttctcttttcctaggcatttcaataaatatcggttttgaaaaaatgtttccctcagagtcattatatataacaagtaaactatattcattgccaactaattttacttttcgaaactgtcaaatcttttgtgtaaatagatctttctcgtaaattgattttttaattatttatttaatcaaagtaggattctaaggtgtcctgaacctgaccaaagcctttatgaattcgattgaaataacggtcattgtagctcattgcctgaatgccaataaaagcatcaagcgactgttcagttggaaactctgccttaggcttagctttgcgcttgatcacattgttaaatgattcaatcatgttagtcgaataaattgaagctctgatctgcttgggatagttataaaagaccagcagatctggttctatgtctttcaagcttctgataacatggctgtaaaccttgccccatttggtatagaagtcatgcaggacagctgtggcttcttctttgtttgtctgttgatgcacctgtttgaattcgttcatgatcttttcacgatcgtcgacgcgtactttagcgcagatattgcgcatgacatgaaccaaacagcgttgaaaatgagctttaggataagtcctggccaaggctgttttcatgccaacaacaccatcagaaagaaaaagctcaacttgctttaagcctcgggatttcatgttttgaagcatatctgtccagacttcaatgttctcgctaggtgcaatgcagtagtcaatgacctccttgtgcccattaggcttgatgccaatggcaatatagactgcttcacgctcaaatgtttctcggcgcaaaggaaggtatgtcgcatccaaatagacgcagaaaaacttgtcgcttagcttgcgtttgtggtaagcctcaacctttggaatcatctgcttggaaatatttgatacctgagctggactgtaatggctgccatacatcttttcaattagatcggctatttccctggtggtcacgcccttggagtaaagcttgataatcatgctttccaagatatccgagtgctgcttgtagtcaggcagcgtgtgctgatgaaattgaccgttgcgatcccggggcacttgcacttcaattgggccaaattgcgtatcaactttgcggaaataagcaccatttctagagttgccagtattccagccatttctggcatagggatcatagcccagaaaggcggtcaattcagcttctaacaagttattaacagcctgttgtagctctttgcgcaataaatcatttattttgtctggattgaatagagcttgagcaaaatctttggtaaaatcattcatgaaggagttcttctttctgtatgtgtttttttgttcaaaccaatcatacgagaaaggaactcctttttctaatgtttaaagaaataaatttaaggaatcattcatccttacacaaactattttacagtctctacttttctactttttaaagctgttaaaatatctttaattcttatattatattctctacccaatgaatatggcttcacttgttcaggtactgaagctatagaaactttctctcttgacctggtcttatgaattggcataaaaacaatattatcttttggtacatcataagaatgcaatttattttcgtcattttgtaagcaaaagcctctaaattggattacttcttcagtattaccattccaaagagctgttagtttaaactcatcttttgaagagaaaacaattttttcagaattattaattacatttttagtaagtattttcacatctacaattggttcatgggataatctatttaaaactggtattaaagcaaagctcaataaacttattagaccatgatacattactgttgttctgggagaagaagatttatcagcagttaaaagcaaaaaactaaaaatactggctgctattattatacatgcactcattatattcactaattttgcaggatatctatttataaaaacagctaattttaccctataatctgataaaaagcacatacttaccattaaaacgacaatgataaaaatatatatcatatatccaggcgcctcaatttcagaagttaaaaataaatatacgttaattaaaatagctgtatatacagttgatatagctactataagtccattaactttattttgaaaaaagcttttcattcctgttctccaaaaaaatagccagctcatcagctgactacaaacttactttcccaacttctcccgaatcaacttcttagcctcatccacaataggcgctcttagcagcatcaccataacaccgacaacaccaacaataacttcgagtcccatcattagccaagaatctttcaagtgtgtattcatccaaaaaactggcaaaaacattactacaccagagaccaaatacttccataggctgttaaatagagtcctatagctcaacaaaccacgaaccgcaatcagttgatacaaagtaacactaatttcggacaaaacagttgaccacatggcaccattcaaaccataaaagtgaatcaacgggaaatttaaaattatgtttactacggcacccactgtaacagaaattgtaaattgcttctgatggtgaattggtaataggtactgcacgccaagtgcgttactccaagcaatcatcaaaatcacgatagactcaatcatcattgctggacctactggaccatagccgggaccataatattttggagctaatgttaaggagattgctgccaagccaaacatcattggtacagccatagccgatacaaaatcaaaagacttatacaacatctgatttaccttcttcatgtcaccatgtgataccgcattggctacatgtggcaacatgactgtaccagttgctgtcactaaagccaaaatcaacttcactaagctatcagaatattgatagtaaccagatgctgtttcattaaccatgacgcccaacatcgtacgattcaattgtacataaacttgagtagctatttgcggtatgaaaagctcaaccattggtaaaaagtgaatccaaggatttaaactcctaatcttaaccttaggcaaatctcgataaatatccggccacaaagttaagttacctagtagagttgacaatgccaatactacaatatataaagttacatcatagggtcccttgataaaaacgaagatcgctatcattgatacaatctttaccagtgagttctttaaaaccgttactttaaagttttcaacaccttcataaaaccaagaaatgtcaaaagccacagcaattagattaagcgactgagccaacatataatcaaactgtcgagtataaaaaataaggaagatttcaaaagcaataattgatacaagagtcattattgttttaactatttgaatctcccaaaaagttttggccattttagttcgattatctcgaacataggctatttgccgattcccataataaccaattcccatactagcaaataagataaagtattgaataatggaatttgtaaaagcattagcacctacaccttcaggtcgtaatacacgactgacatatgccgatgtaataagcggaactattattgctaatacttgataacctacattatagagataatttcgaatgaccttcatttaaaacctattcaccaaattcattatttaccgcatcgagtgcagcatcaattacctgatccatattgtaatacttgtattgaccaagacgaccaccaaagattaccttgtcttgtttctttgctaattcagcatatttagcgtacaaactattatttctatcattattcactgggtaatatggctcgtctccacgcttccaatccgctggatattcccgggtaataatcgtcttatctggatcacccttaccgaattcaaaatgcttgtgttcaattatacgagtgtaggggatttcagcttcagtatagttgatcactgcgttgccttgatagttgccaacattcttttcttcagtttcaaaacgaagtgaacgatattcaagttcacctaatttatagtcaaagaacttatcaatcataccggtgtagacaactttatcatagttattaagatactcttctttatcatcaaaaaaatcagtatttaatttaacttcaatatttggatgatcaagcatcttttccaccatttttgtgtaaccaccaataggaataccttggtaatcatcattgaagtaattgttatcgtaaatcaaacgcactggaagacgcttgataataaaagcaggcaattcagtacatggtctgccccactgcttttctgtataacccttgatcaacttttcatagatgtcacgtccaattaaagaaatagcttgttcctcaaggttttgtggttccttgcctgccatttcttgtcgttgttcattgatcttagccatagcttcttgcggagtccctactccccacatctcgctaaaagtattcatattaaatggcagattatacatacgtcctttatagttggcaacaggactattagtataacgattaaattcagcaaattgttgtacataattccaaacttctttgtttgaagtatgaaaaatgtgagcaccatattgatgaacctgaatcccatctacttctttagtataaatattacctgcaatatgatctcttttttcaattactgtaactttgtttccacgttttgctacttcatgagcaaatactgctccaaaaagaccagaaccaattattagataattattttccatcactattcaaaaaatctctttcaataaaatttctaaaatgtccagaccaagctttccaactggtaagactaaaataaacatttctactttcatcagaaagtctttcaaattctttatttctatatgctttttcaatacacttaccaaaatccccctctccgcgacaatggcagtgtatatccatttttatcatttttaaacaaaacattttgacttccgtatggcatccattttggatttacaggagcaatataacctacttttctacttttctatttttttagagtaacatacatttttgcagtaaagttagctgtttttctattcataaagaatttaaaaaacgttttttttatcatgctattttcaaaataagggactgtatttatctctatatcttgtaattcgtaaactgctgacattatattactccaatacttattattaaaaccattaatagacaccctcttatattctgccaatataagtcgtagttgcatataaagtctatacttaaacttcccacactaaataagccagtaatctcttgatcttgcttggctttaggcttctatattatttttgctagttttctttaacaatttttgcatgtatttgggtaaacgattgataaagtcagccgtgaattcagctatttgtgcttcactggcatgaaagacttgctttacgctggccagcattgcatcagtaatcaattgcaaggaatggctaaaagtaatgtccgccagctcatcaatcatgcaatagaacagctcgcctagcgtgcgttcatcttcatcgtcccgcttggcaactgacataagcatgtagcgagtaaaaactatggcaacatgagcggtcaaagcatcgtaagacaggccatgatattccgtacttagttttagataacttttgcaagttttgaaaaaaacctcaatatcccaacgcttgccgtagttgcggataatttcatcttcgctaagcgacatgtcggtacaaatgattgccagccaatccttgcgattggcacggtttctaacgcagacaatccgtgcatctattttagcaccgtctttgtcctggcgtccgactttgactgggattgacagcaggtagcgagaacggccgcatcgctttttacagctgcgataaatctgtttgatgtttttgcgttctccctcaaattcatatttgattttggagctaaccttaaccatggcaatcacatccagcttcctttgcttgagctggacgatttgatgtggatttgagaaccagctgtcaaacagcacgtacttggcttgatgacctgctttcatagcttggtcgattaaattaaccatcacgtctgtgcctttagtccgggcaagcatacgtctttggccagcaatggtgcgctgatcaaaaactttattttcgccaatcatattctgtagcttctgagaagacagcagcactgaattgattggcatgaaagaagctccatcagtccagcccagggtcatcatgcgaaaacctttcttgtaagtcattgatacatggtcaaaaactttggcgactaattctgttttcttgaagccggtcctagagaagtaggaatcatcgacaacaaagcaatcagcccgtttttctgaagtcaaagatcgcaagtggttattaatgatttgcgcagacagaagtgtggtgaagtggagccaattgacgtgaacgttgcgcataaaacggtaatatgagttcttggaaaaattttcttgaaaatgatccattttcagctgcatatataagctgcggtcacgaaagacattgcttaaaacgtaaagaaacaagctgaacaggctaatgcctttttccttgcggaagccacattttctcaacagcttgatcacctgaaacttcttgatgaagctgatgattgagtttgaaaatagttgttcattttgttggtcaggagatggtaaaatagacattggcacaagcctttcatgcaaataaattatgttttggtcaatataattatagcaatgaaaaggacttgtgccttttatatttgtcaaaacacgcagaatcacaatgaaacaagcaattttgcgtgtgggaagtttaaggtctatacattaaaaaatcgacattattatcgacattattatcgacattattattgttgattatttcaaaagtttttttccacacggttaaataagaaactgtcaaatcttttgtgtaaatagttctttctcgtaaattgattttttaattatttatttaatcaaagtaggattctaaggtgtcctgaacctgaccaaagcctttatgaattcgattgaaataacggtcattgtagctcattgcctggatgccaataaatgcatcaagcgactgttcagttggaaactctgccttaggcttagctttgcgcttgatcacattgttaaatgattcaatcatgttagtcgaataaattgaagctctgatctgcttgggatagttataaaagaccagcagatctggttctatgtctttcaagcttctgataacatggctgtaaaccttgccccatttggtatagaagtcatgcaggacagctgtggcttcttctttgtttgtctgttgatgcacctgtttgaattcgttcatgatcttttcacgatcgtcgacgcgtactttagcgcagatattgcgcatgacatgaaccaaacagcgttgaaaatgagcttttggataagtctgagctaaggctgttttcatgccaacaacaccatcagaaagaaaaagctcaacttgctttaagcctcgggatttcatgttttgaagcatatctgtccagacttcaatgttctcgctaggcgcaatgcagtagtcaatgacctccttgtgcccattaggcttgatgccaatggcaatatagactgcttcacgctcaaatgtttctcggcgcaaaggaaggtatgtcgcatccaaatagacgcagaaaaacttgtcgcttagcttgcgtttgtggtaagcctcaacctttggaatcatctgcttggaaatatttgatacctgagctggactgtaatggctgccatacatcttttcaattagatcggctatttccctggtggtcacgcccttggagtaaagcttgataatcatgctttccaagatatccgagtgctgcttgtagtcaggcagcgtgtgctgatgaaattgaccgttgcgatcccgaggcacttgcacttcaattgggccaaattgcgtatcaactttgcggaaataagcaccatttctagagttgccagtattccagccatttctggcatagggatcatagcccagaaaggcagtcaattcagcttctagcaagttattaacagcctgttgtagttctttgcgcaataaatcatttattttgtctggattgaatagagcttgagcaaaatctttggtaaaatcattcatgaaggagttcttctttctgtatgtgttttttttgttcaaaccaatcatacgagaaaggaactcctttttctaatgtttaaagaaataaatttaaggaatcattcatccttacacaaactattttacagtctcttaaataatcattaattatagactttcttatatcagttgctgtatttcctggtctatcttgtaaataaaaagcgagggctttatcataatatgatactttcttcgctctagacaacgcaaccaaatataacaaaaaatccgtataactcacgtgtttagggaaactaacattttttagcaattgggttttataaagttttgcatgcggtgaaacttgaaaaaaagaaacatactaacctagtgttggatcatgaatcgacggattcacgatctggcactttttattttgtctaaaatagaaagtgaagataaagcaaatcaagtcttcagctttttagacacttgatgtcgtaaaagaaacggactgctttaccacctattcttaagtctcttcgaagtctgtgggcacttagatgccgtgtttagaaaattagaattaataggttgataaagaggtttatcttcacagcggaggttatattatggaatcacaaattattttcggtattgatgttagcagtaaatcttccacagtttgtgtggttaatgaccggatcaaacaaggcgaatcttttagaatctctaatgattcctttggctatcaaaaactttatgagcaactgaaccaatatttgataactcctttagttgttttcgaagctactggtgtttattctctaagcctgcaagctttcttagaggattatcatattaagtatttgaagcttaatccgcttaaagcgaaaaagctaatggacaataatttacgccataataaaactgataaggtagatgcttatcgcctggctttaattcaatttaatgccccgcaaaagctgcgtgatccacagcccagagagtatcatgaacttcagaatgccagtcgctattatgaagaacttactaggagtatagttactactaaaaatcaattgcaccgcaacctccaatccactttcccacaaattgaagaaatactgtctcatccatctggcagaatttattgggcgcttgttagtcttttcccacatgctggatatgttctagaaaagaatgagacacaggtaactcaaatgcttaattctatttctggaataggacaacaaagggcacggtacttaaccacaagattatacgcttttgctagagaagcttatccttatgattccaaagatagtattatcgttagagctattcaaaggaacatttctaatttattttcactccagcaagaacgcgactatgtaattaactacatggaaaagctggctaaagcagtaaacgctcgtgctttatccatctatttgagtatcccaggggttgctagaattacagcagtgagattagtagcagagctcggtgatctaagacggtttagcacttcagctcaaattgatgcgtttgttggcattgatccaggaaggtaccaatctggtgaaaaagacagttctcttggcattaccaagcatggcaatcatattgccagaaaaatactttatcgagttattactcaaatggagacggtaaaggctacgcagccttgccatataactgattattatgacaagaaaaaacgatcttcaaatagacaaggctataagaaaatcgccattgcatcagtccataaactgatacgcacaatgtttgctcttatcaaacatgatcaattatatgattacaacatagccaccgaaaataaaagactttagctgaaatcaaataatcaacttaagtataagcaacctatggaaaaactacaagtattcataggcttatttgtggtactttcgctttttcttaaatttaaactcttatttgctttaaccttattcgcatcattaaaacaagtaaatttattttcttaaatcattgataatacttgactttgggtagaaaaacagctgtatatcctgtgtttctgaatatacttttttaggttcaatactttctaaatatcctggtttcacagaacatttatgagcacttccatcatcagcatacacatcaaatcgatcccctactacaatatcagtgtcattatttttggcaaatgtataaagtacttctaaacaatcttcttccaaccaatcatcaggatcacacaccaaaaagtaatcagaattaatactatttatagctaactctaacgctgaaccatagccaccattttctttatcaattactttaattctattatctttcgcagcacattctttcgcatacttactagaattatctggcgatccatcattaatagccaaaacttcaaaattactgtatgtctgattttctaatgactcaaaacatttttttacgtatttttcaacattatacattggaacaattacggttatgtctgatttcattattttattaccccaaataaattttcttcaacttttcagcagtatttctaatatcgtatccttgtttttttaaaaaatttgtattttctgctcgatcatacttcctggatagtaactttaaactttgcttataccactctttaagcgataaatttaagtcaagaaacatcacgttatcagtaaccttaatatctagaggaacattagtggaagctaataccggaagcccagcatcctgagcctcaatacttgcaattcctagtccttcatattcagaaggaaaaataaataaatccattgcttgtagataatcttcaacattatctacatttcctattaattgaacatatttctctaatcgattttgcttaatactcattcgtattgatttttcctgtggaccagctcctataagtaacagcttagccttagtattatttttaataaaataacttaataattttattaaaaatatttgatttttctcaggtgatagccttccaacatgcccaattagtatttcatgatctgaaatattcaatttgttacgataatgttctctagtcccaatattatatgcatactgctgtatgttaattccatttttcaaaattcttccttttttgttaaaaattttttttgaaaattgccaatatgcagctttttttgttggagcaaccaaaacgtcagcatatttactaaagattggtgcataaatctttttaattacttcatgctttacatttttattttttcctgacatgtgcgaatgcacaataacttttttcacacctgcttttttagcatacaaggtaaataatgcaagtatagatatacttccactatttatatgcacaacatcatattgattatctagcagaatttttttatatgcatttacaacattaaatctattctttccaacattaaaaggtaaattaaaagagtatagcgtagaatttagtgatttaataaagctaatatagtcgggattatcagcataatatggtgttaaaaaatcgaattttagaccttttttgttcatattttcaattgttctaaatacaaaagcctcttgcccgccatacaaaattggctcaccaaacgcctctaaaatctttttcatactatccaactttctacatttttattttatatactctatagacggattaaaacgtaatccctcaattgttcctttaaatatcatctttaaccttttacgtttattatttttagctttgaacaaaacccttatcatgtgatcatttaaacgtaaaaattcatatccatatccttttagcccttcctttctataaaagaaaaaatcattcctatacaaatatctatatctttctattctttctgggacatctgttgcaatgtttgcaccaacattagtttttgttttatgtacaacaatactattagttacaacataacattcatattttgaggaaattcgtcttgtatattcccaatcatcagtccaaataaagaattccttaattggtaaccctacttttttgataactgaaactggaacaaataaggaaacaaaagaagctaaagtaacaggtatcaattcagatgaaaaatcagacacattttttgttaatgtccttctctgaatattcatcgtacacaaggtattatcggtccacaaagttttactagacaaaaaaccataatcatgatttagttttatatctgccttaagaaactcattcaaagcatttttagttggtatgcaatcatcatccataatccaaacaaaatcataatccttttgagctaccatctttataccatactgaaatccaccagcaccaccaagatttttccccgtattaacatagtttatactgttatcatcaatatattttgcaatataattaactgtaccatctgtactattattatcaataatatatatatctggctttgcggtttgttccaataagcttttaatacattcttttagtaacttttttctattatatgttactacaatagcggcaacttgctgtttcctcataaactttaattctcctttttattcataaagctaactacagaaataaaacttaataaaaatggtactattagaaatctaaatggatcatacatattttgtgacattatactagttaatgcagtagtgcaagttagtaaaaacaaaaacttattttgaacaaatttgactttttttaagcttacatataatcccattacaaatggcgatataaaaatagcaaaacctattattccatattgaaataacatagataatatacctaaatctgattggtttaccatatgtgtatccaatatattaaaataattcccatcgtttgatataccatatccccaccatacacctctttctatccaaagagtttgatatgtatttaatgtcatcattcttatttgagtactagatccatagtctgcatttgaagttgaaaaagtattaaccaatttatttaagtaatttcctctaaaaataattggactaatggctatagctcctaccacatctagagctttacttttaaaagtatcactaacgataagtatgaataccactaaacttaataaataggctatttgttgtgaacgtgagtcatacacaatatatgcatataaaaagcataatactataactgagatattacgtgttttaattacaacacttttttctttgatgattttgaaaagagccataacccatacgtaattatctaaaaaagtacctggtaatctacttactccatttctcgcccaagcaaatcccattacttcaaaataacctggagctacattcatacgtaatttattgtacaaaaaccacgcgctaaatctaaatattaatatagcaacccccatataatatatattattaataaatttcattcttcgtttagcagtcgctagcacctccgtcatcggaaacgttaacaacatatacgcataatatctattatgaattaaagcatctttaattgtgtacccagataaggaaaaactatttagcctatataactgtagcccaaacataaaaataaaaacgcctatataaatagatacatatctgagactgtaaaatagtttgtgtaaggatgaatgattccttaaatttatttctttaaacattagaaaaaggagttcctttctcgtatgattggtttgaacaaaaaaacacatacagaaagaagaactccttcatgaatgattttaccaaagattttgctcaagctctattcaatccagacaaaataaatgatttattgcgcaaagagctacaacaggctgttaataacttgttagaagctgaattgaccgcctttctgggctatgatccctatgccagaaatggctggaatactggcaactctagaaatggtgcttatttccgcaaagttgatacgcaatttggcccaattgaagtgcaagtgccccgggatcgcaacggtcaatttcatcagcacacgctgcctgactacaagcagcactcggatatcttggaaagcatgattatcaagctttactccaagggcgtgaccaccagggaaatagccgatctaattgaaaagatgtatggcagccattacagtccagctcaggtatcaaatatttccaagcagatgattccaaaggttgaggcttaccacaaacgcaagctaagcgacaagtttttctgcgtctatttggatgcgacataccttcctttgcgccgagaaacgtttgagcgtgaagcagtctatattgccattggcattaaacctaatggacataaggaagtcattgactactgcattgctcctagtgagaacattgaagtctggacagagatgcttcaaaacatgaagtccagaggcttgaagcaagttgaactctttctttctgatggtgttgttggcatgaaaacagccttggccaggacttatcctaaagctcattttcaacgctgtttggttcatgtcatgcgcaatatctgcgctaaagtacgcgtcgacgatcgtgaaaagatcatgaacgaattcaaacaggtgcatcaacagacaaacaaagaagaagccacagctgtcctgcatgacttctataccaaatggggcaaggtttacagccatgttatcagaagcttgaaagacatagaaccagatctgctggtcttttataactatcccaagcagatcagagcttcaatttattcgactaacatgattgaatcatttaacaatgtgatcaagcgcaaagctaagcctaaggcagagtttccaactgaacagtcgcttgatgcttttattggtattcaggcaatgagctacaatgaccgttatttcaatcgaattcataaaggctttggtcaggttcaggacaccttagaatcctactttgattaaataaataattaaaaaatcaatttacgagaaagaactatttacacaaaagatttgacagtttcacatatcttgaaacttttatttctctatttttttgatttacataaataaaatacagtaaaacagatataacaacacctatactaatacttaaagaatttaagtctttaaaaaagttgataaaacctaaatataaaaaaactataaggtaaattgaatattcatacagttttactgttttccatctcatattttttctcataccaaattaaaaatgtgttttcgtttttatacctatttttcgtttaattaaagaaaagcctttctttaaagtattctttccaccaatttgtccccaaggaacttctacataagtaaatgaattggtaccaagccaaacatccattaacaactcagaaatatatccaaatactctcgcttcttgcacagaatattcagaaatattaatgctattttctagcttacttagaacatcaaacatgaagctacaatatgattcaaatgcattccttttcataataaacatattaaacatatgagccccacgctttttcataactttatcaaaagcaggaagataatttggatatacttcagcaattacctttcttgcttcatccaaaggctctttatgatgtgcatgaatgtaatgtgaataattagtttcaatataataatttctttttttaggtaaaattacatcatatttttgtaaaagctgatttactttctcaatactaattacattatctaaagaatatggtcttttctcaaagagtaatcttctatagtgaactaatccaatagcgtcaacatcttttaaattcttccaagcccaataaacagcagttagttcattgtaattaggatttttagaggatatattttcaccatcatcatcacgctgataggaaatacctggtttataattctttactgcgcctactaatactggtaaatatccttcctttttgggcataggaaactctttatgcgcagcaaccaaaatttctattttcaaagactcttctcctgatcaatacgctccattaggatgaataaccaccccaattgtcttaacaatcaacttcaaatcttcccacaaaccggaatggttgatatacacaatatcaagccaaaccatttcgtcaaagtcagcttcactacggcgtgttacctgccacaagccagtacaacctggcataacgagcaaacgttgcttatcgtagtcagtatactcagctacttcagagggtagagggggccgtggaccgactagtgacatatcgccgatcaagacattccacagttgtggcaattcatcaagactatacttgcgaattgtatgtccgatcttcgtaattcttggatcgtccttgatcttgaacattgcgccgtcaatttcgttctgatcttctagttcatcaagcatttgatcagcgttaacgaccattgaacggaacttccacatcttgaacggcttctcatctttaccgattcgttcttgagaataaaatgcaggaccaccatcttcatgtcttatttttattatcaaaaataaaaataacggagatagtaaaattaacccaagtgcgctagctagtatatcaaatatccccttaatcgtgtgatacactggtcgtccgttaacttttgcaggattaacttgtagtttatcatactcctcttaccctctgtttgatttagtctatttgaatacactctcttattaatcttatcacgtttaacgcaacttagaagcaaacttgcatatttgcaccaagcattaaaataaccagaactttttcttctgcttcaatgggtgccaatccatctgaactgggtcgccattgatgatacttctagcattatcttgccactgctgagctagatcttgactgaattcttgactcatctttttataagcttcactcaattgatactgccgtcttggcaagtcgtgtgcgtcgctagcaaaggtgcatccctgccccgtcgcaatcaacttacgcgacatctcttcgattttcttgccaaagattcctgtataagagctagcagtaatttgcaccaagcagccttgttccagcatcccttgcaaaatttccggttccttcaagatgcgactattgcgctctgggtgtacgataatcggcgtcaccccgcgctgcatgatcttgaagatcgtgtcttgcgcataagttggcacgtcctcacttggaaattccaacagcatataagtaccgtcttcatcgcagaacaggatatcatcgttatcaagcgcatcaattaagtcacccgacaagcgaacttcctgccctgggaaaaccgtcaacggcaccttggcctcatctagcttctgttggtagagatcagtcagccagacgatatcatccttatggttagtgtaacgaccattcagtgtatgcggcgtacaaattgcatgcgttacgccatctttgaccgcagccttggctaacttaattgaagtgtcccaattttttgagccatcatcaatgccaggcaagatgtggcagtgaatatcgactaaaaccattattgatcgtcactcttttttctaccgaacaggccctttttcttctcagcgccatatccataaccatagccatacccgtagccgtaaccatagccaccgttttcagctctaatgtcgttcatgacgtagcctagaatccgagctttggcaaattttaacatttgcactgctctagtaatcccagccttttgcgtaacgccttgacgtactactaagactacgccgtcaaggtgactagccaactcttgcgtatcggatacttcaagaacaggagctaagtcaatgataaccatatcataatgtgacttaaccaattcaatgaaggtttccattctgcgtgaaccaatcaattcagctgggtttggtggaatcggaccagaagtcaagattgacaagttatcaattccactttcttcaaccacatcatttaaattgattgcgtcagcttctgaagtaagaacagttgtcaaaccagtattgttcttaacgttgaacgtactgtgcaaagttggacgacgcaagtcggcatcgattagcaaggtcttgcgacctgcttgtgcataggtgatcgctacgttggccgtaacggttgacttaccttcactgatgttagctgaagtaaaagctaaggtactaatttcttcatcaactgccataaagttgatgttagtccggatagttctgaattgttcagataccgcactacgaggatcagcaactgtgattaatttggcaccatgcttaattgtatcgtcggtaccacgcttttttctaaataatgccatttacttctcctctcctatactcgacggcttctacgcttagggccattagaattcttattcttttttctaatgacaaatgatgatgacacatggaagtgtgaaacttgacctaagtcaactaaacctaagttatcagtcaagaatgcatcatccttaactgtagtgtcggacatttcacgaattaagactactgcgaaacttaaaaccaagccaataacaaagccagccaaggtaaagagtttcacattaggtgatgattgattaccatcagttgctggcgcaacgatcgtaacgttgttaatgttcatgatgttaggaatttgatctctgaatgaacgcgctacagcgttagcttcaacctttgccttttcaggtgtatctgcagtagcagaaattgagaagacctgtgattgttgttgagtattaactgaaacgctcttggctaattcgctagtagaaacgctgtaactcttaccgctacgttcaactacttctggttgagcctttcttactaatactcggcgaccctctgcattagtcttgtacttagcaggtttagcctttttaaccactctaactgggttagctaaacgattagaagcatcttgcaaaataacatgactagttacaatatccttataggtagtaaccatttgcatgttggcttgttgagtattatatgccgcattcgggtcattcttgttagccttttggttaaccaagatctgtgcattagaagtatactttggtgaaataataaaattagcgacgccccagccgactaaagccaaaccaacactccagataatcagtgcccagatgtggcgacggcaaatttgtagcaattgagtaagatcaattgtattttcagtttgcttttgctcttgttccatttaccttttcctttaataacgattaacgattcataatatagctagccttgttagcagctaccttaacatgtggcaattctagcgccgttctgatcttatcagaaactcgttgacgctcttctctacttaccacttcaatttccatagtgccaaacttagggttttgcgtttctttacttacaccctgagcatgatcttgagaaagattgttagtggcttttctataatccatagcaatcttgtacatttgattcatagtcaagtcagtctgcatctcgctagaaatggaattcaagaaacttgaattaagcaaagttgaaggtgaaacagacttcttaagcaaggccataattaccaagcggtcacgctcttgtctaccataatcctgacgagggtcaccatgacgaagttgggcaaatgctaaagcctttttaccattcatgtgataagtctggcctttgacaaagctataacccatattgttgaaagttaatggagaagttacatcaatccccccaacttggtcaattgccttcttcaaaccacccatattgatcatgatgtagccgtcaattggaacactgtaatatttatcaagtgtcttaatagtttcactaactccacccaatgtataagctgagttgatcttggttacaccatattgtgggtaatctgggaagattgcatttgagtcacgtggaattgaaacaatgcttgtactattagtcttagggttgattgacatcatcatgatggtatcagttctacccttccagtgacgacccatggcaccagtatctgtacccaataacaggatattaattggctttttctcattcagtaaattatcaagagtacgtcctttattactcttggtagtcttagcaacgggagtgtacatattctgcgtcgtatcacgcaaatttttgtagatcatcccgcaaacaaaaagaccgactacaatgatcacgccaataataatccaaaaaccgcgccagaacttacggtgacgacggtggtgatgatggcgatgacaatgtatcggtttattacttgattctgcgttattttccattctaatcctcttaatcttataatcgttattattatatactcaagaacccattttgaccacccttaaaaggtttacatgcggcaaatacttaaaaggaggctcgttttattgctgttttgggttgctgaaataatatattttggtagatgtctaacatgtaataaaaaatgcatccctcgaaaaatggaatgcattgctgctagattgagtttaaacggaattatttttcatcttactatcgccttgccttaaattgtactcacactgtaccatatttagtaagacctaaataaccaaaaagtattaagaagtacattaaatagaagttggatagcatgttaagtattgaagaatcaatcaaagaatttgaaacatattttcagggtaaaccaaatgaagttgaagtagtatcacgaactataaaacaaaaaagtagacggccacataaaccgcctactttatcctaattgttatgatgatcacttgagttagttaaatcatcatttttagttagatcatctatatttccaactactccaccaaatagtgtaaacacacctattccaccaaaaatactaccagccaccgaatgcctttgcatcaccaaaaaagcagaaatacaaatacatagaattgttactattgatactactatcagagatgtccatgcgagccaacctcttcttttttgactagcaacttctaatctccgtctatgcctactttcttcaacaccattattaaattatttccttagcagcattcggatacaatttttggtatccctcaagaatatcaggaagcggaattggtccactatgcatctcaagataagccattatttcttttttggtttctttaggcatctcagatttttgaatttgatcaagaatctattcatctagcgaatctttatctgactttttctttatatcattttctagctttttacttggcttttgatctgccataagatattattccctttcttaagtcgtcccctatcctttgccaatcactggcaatagctttttcctcagcattactattactagaatatatcaacttgtttaataatttgacataaggcatagctacatttttcgataattttttaaacactaattgaatatcggtaaacataattctcacctcattcataatctctttctttattaaaagtatacttaaaatttgactcgtggtaaagattattcttctacatgcgatccacttctttccttattataagcatctgtaatacaataaacttaacagcaaataacgaggtgtttttatgattgataatcaacctaaaaagacaaaagcttatatcgcgggcgtaaacttaaacgaccaaaacttcgactactacatgaccgagctggccaacttgactgaagccaacaacatggaagtagttgggcaaagctttcaaaatgcagaatcaattgtcgccggaacttacttcggtgtcggcaaaatcaatgaaattagaactatggctcaaggcttaaaagcaaaagttttagtccttaatgacaaattgactcccgtacaaattcgcaacttagaaaaattaaccaaaatgcgagttattgaccgcacggaattaattctggaaatttttgccagccgcgctcgaactaaacaagctaaattacaagtgcaactggcacgtttacaatatgaattgccgcgtctccatccctccgagaacaacttggaccagcagcgtggtggtggcttcgctaaccgtggtgccggtgaaagtaaactagaattgaaccggcggacaattggcaagcaaatttcggctatcaagaaggaattgaaggctgttgccggccaggaagaaatcaaagcggcacgacgcaaccaaagtcgcatccctaaagtcgctctcgttggctacaccaatgccggtaaatcaaccacaatgaacggactattgcgtgaattttctaaagaaggagccgacaaggaagtcttcgttaaaaacatgctttttgctacgctagatacttccgtgcggcggatcaacttgaaagacaactttagcttcattctgtctgacactgtcggtttcatttctaaactgccccacaacttggttgaatccttcaaggctaccctgcaagaaacgcgtgatgctgatttattaatcaacgttgttgacgcctctgacccgaacatggtccaaatgattcggacaacacagaacgttttggatgaaattggcgttaaggaaattccgatgattaccgcctacaacaaggctgataagactgatcgcaattacccacagatcgaaggcgacgacattctttattccgccatcgatccaaaatcgatcaaactactggccaacttgatcaccaagcgcgtttttgccaactataaaaagtttgacttgatcctgccactaagcgcaggcaaggaactggcttacctgcatgatcgcgcccaagttttacgtgaagactaccaagacgatggcgtccacatcgaagcgaacatcgcgcccgacgaccaaggacgctttcgtcaatatttggcctaactcgattaggaaaaaatatgaaaaaacataatctgctgttcctttttgccctcacatttttgttagttcctactaacacgcctgtaatggctgctaaatatagtgctagtgagtcaaaaaaggtgcgcacttttcaaaaaagctatcatcgtttgagccagaagaattacaatcagactacgctctttaccgtgcagccaaattttggtattcctttttcagcaggagtgcttgaccctgattacatcaaaacttcaatggcttatgtcaattattaccgctcattggttggactgcctgatgacgccaattatgctaatgataacgttaacgcacaacttggtgctgcagcgctagcttcagttaacgcggagcaaaatctgcgagcccatggtttacaaggttacgtcaagcctggctatatcagtgatactgactgggatacagcggaaaatactacattgggcaatatcaatttttcagaatcaactagcggaaccacggctggcgagatcgttaccgatctgatacgtgaagataataatattgcaggtaatggcaacatcggtcaccgcggcatgatcctctcgacgcgagccacccgaatgggaatcggcgcagcttatggcaccgaaaacaacgtcttgtattctgttgaacatggactatttgccgatgatattttgcgccagcctgtaaaaagccgaatcgtttatccagctgccggcgtttttccttacgaattagttggtggtaaaacgccatggtcttactcaacaaccgagcgaatttctggtcagccgaaaatttacatcacggatttgaccaccaagaaaaagcggcaagcgacgcaggtgcgcaacttcggcactgctctttatggtgacggctacacaacgacaatcacttaccgacctggcaaaaccaagttgatcagcacgcacaagtaccgtgtgcaaatcggcaaacattatagctacagtttcaaatttttcagacaaaatagcacattgaaaaataaacagattgtaaagcatcgaaaatgaaatacgttgatatgcaaaacggctcaagcagttgtacatcctgcttgagccgttttagatagtaacaaatattgtagtctgttcaacaatcttcatgtaaaataatactcaggtctattgcagcggttagctaccgctaagacttagtaattttagcatggctacacacccctcaagattttttaagttacggaggtggaagcatgcataattgggtagactggagaagtaggcttacaaatgattgcttgggctattgcgtatgcgataacaaaaaaagctaatcacaaggattagccgaaacaacagtcatcttaagttacgattggagttagcgaccgacactcgctagctccttttcttttattattttaatatgatttagaatttattgcaatgtttagaagtgcttattctacgccaatgacgtaacgcatgatgaatcaatagcttgttgtaccaagcataattgtgcttcatataattataggcggtggcaaagttatccaattgtcccgccgcgataaattgattgcgtgtccaatgccaatcctgagtaggataatacaaaattttcactcggattacccttcctactgtaataattgcccgatcatgatgataacgcgtgcgagcaacattgaggtagctaccaattaaagtattgcgccagtatcgattatgcagataatttttctcccaaagtaaggccttgcgcaataccttagaaatgcagtaccattcgcgtttgccgttaggcaattcaaccaaacaccaaagatattggtgtctcttcgccattcaatccaccccttctaattaatatcggctttaattataccgctactagctattcagttagaaaatcaataatgtcagaaaatattaggtcatgatgtcaaatctattcaactgacatcatttgtcctaagaacgcatttaccgcttgcttaatatactcgctgcaaaggtgagtatactgcgttgaatttctggacatggctctgcttaaacggtcttgatgggtgtcattttaatccttctttaatttttactataattttctccacactgaaaactatggcaaaaaaagtagaatttttcagtctagggaaaacttttatcaatacaaaaaagcaagcgcattaatcgcctgcctaaaagtattccaaattacttctctatagtactctcttagcaattgatggtgtaaagtaactcgataccgtttgcaaaatagtaccttgctctggtgttgctgcatttacatattgattgtttcctacataaattgcaacgtggtatggagctgtcgttgaaccccagaagactaagtcacctggctgcaagttgttcaatgaaacagtttgaccaaccttaacttgatcataagttgttcttggtaagttcacgccagccgctttttggtaaacatattgtactaagccagaacagtcaaatgaatccggaccttctgcaccccagacatagttcttacctatctgttgtttagctagcgcaacaattgaagcggccttactagtagcttgcgttgaagaagtttggttagtattttggctagtcttcttgattgccgtattaacaatttgcttagccttcttcaccttagctatcttttcagccttcttctgagtagccgttttagtagctactgccgctgtcttcttattaacagtagtctttgtctgcttagcttccgttttcttaacagttggtgcttgcgatacttctgctttttctccagcagtaacatctacggtataacgcgcttcaatccattcacgcgttccaaccttgtaccacaagttgcccttcttatcgagtgcagtctcagctacattccagaccgtgccgtccttagcacggtagcccatgaattgaccattctcatagttggtccaaatattcaggctcttacctggtaaatagctaatcttaacttgcttaatcgcagtaaaattagctgcacgaacagttttcattgatgtgattgcggaaacacccgtaacggtcagggctgcagccgctcccactttaaaaaaattatgtttcataattgaatccccttggtagcgaaacaggtgaaaacttttcacctaaaattacccactcttactatgtaacgccttcattattgcatgtcctacctcaagaagcaaattagaacattacaatattacaaaaaagacggatcactggaatccgtcttcattacttactatcttaatttaaaacacgcttagcaacacttgggtagaagtatgaactcaaagtttgcttgattacgccttgacctggtgtagcagcgtggatgtattggttgttaccaacatagatacctacgtgatatggagcacttgcactaccccagaaaagcaaatcacccggttgaagattatccatagaaacggttgatccttgcttaacttgatcataagtagttctacccaacttcacgccagcagcgttagagtaaacatattgtaccaaacctgaacagtcaaaaccgttagttcctgtaccaccccaaacataggacttgcctaattgtgctgaagccaaagtaataactgctgaagcatcaccagttgcttgaactgacttcttagcctttttagctttcttaactgcttgagccttatctgaactagcatcaacagtatattgagctaaaatccattggttatcaccaatttggtaccatgtacggcccttcttatcagtcttggtgtcaaaaacattccaagtagtaccatgttgagcacgttgaccagtaaagtggccaccattgtagttgtcccatatgttaattccataacctgcaatgtagttaatctttactttggtagtagcagcttgaacagtagcattagttgaatctggcttgatgacatttactgcagctacaccggtcagagttaatgcagcagctgcggtaacttttacgaaattgctcttaatattcatcaaattctcctgtatgttttcactatatctataagcattcttagaatttattacttaagctggtaacgaaaatattaattcatcgaaaaatctttaaatttctttaatgtatttaacaaaatctataataatgccccaatgttacagtagtgttacaaaagtaatactgatttaataaatattacgtttccgtcaaaaagaaaaatagctagggagatttccctaactatcttaactagatatcttatttttaggaagactaacgcaattagtcgattacacgcttagctgatgatgggtaaaatgaagctaaggtttgttgcttaacattttgaccaggagctggagcgtgaacaaacttaccgttacctacgtagatacctacatggtagttaccccagaataataagtcacccttcttaagcttcttagttgaaactgaaatggtcttaccaagagtaatttgaccgtaagtagttcttggcaaaattttgttaattgcattcttgtaaacgtagctagttaaacctgagcagtcaaaaccgctaggacctgcagcaccgtaaatgtaaggcttgccgatttgcttcttaacaagcttaacaaccgcattacgctccttagtagtagctgattccttcttaactgaacttgaatcaggattggtagtttcaagatctgaaattgagttgttagtattgatagtagtgcttgaaacatcatcagcgtgaacagctggaacattgatcattgaaataccggcaaagaatactgataaagctgcggtgtattttactaaagtacgtctaaaattcaaaattaattgtctcctctaaaaattactaaatttgtttttgatttcttaaatcagttgacggtttatataataccgactgaatgttacacgaatgtttcaaaagagctaccatcgcgttaagaaacatgttaaaaaaacagattttatgtaaaaaaaggagaagcaaaatgctagcgaagctttgctacaagggcatcgagcgcgtttttagtttctgttaaattgtcgttaactaagatatgagcgtattgcttcaaatcttcaggtaaagcatttaattcactgccgctaagtctttctttaatcttggatggatcatcgccccgctttaaaaggcgctgttttaactcttctttagtagaagttgtaacataaagaaaataagccttgtcacctagctgtttaatgtaggaataaatgcccttgatatcgacaattaatgaaaccagatcactttttttccaggccagattcaaagcttctcgacttgagccatattgataagagccgtacttaatatgctcaaaaaagtgcagctgggcaaaagtttcatcggtttcaaaatgataagaaacattctgctcctcgcctgatcgcatcggccgcgtggtatgcgttaatacgcgtggaataccatatttttcagttaaatattctgaaacagtcgtcttgccagcaccactaggtcctgcaataagaattatttttttcaaaacctgattctccccacttgaaaatgttgcttttttataatagcattcttgtgttataaaagactaagactttttctcggaaggaagatacacataatgaaaaaagcagacgtaaaagttggtgcaatcgttggtgccaagtcagaagaagaacttaagaagccattccaaggcaaagttgaaaagatctacgaaaattccgcattgcttgcaattacttcatacgatcccgttgacaccactgctatcagcgacttgaacaataagatcgtagttaacttcaagaatttaaagactgctcgcgctgccaagaacagcaagactgcttcaactaatgaagttaagattgaaaaaattgccaagaagaacgacgataaaaaagaagcagacaagaagtaaaatttgacaaaaatagcccgcgcaatgtttacgcgagctatttttttgcctaaaattaggacatcgatacgagaggaaatattttatgaaagaaaaaacgcgaactgttttattttggtttattttaatccagccctttttagacctttattggttctacaacggtaaattagcggaagttttaccatttactctacctacgattatccgaattttagctgtttttgtgattttctgtatgtttttcagtcaaaagcaaaattggcaaaaattagggcaagacaagtggttaattctatatttagccctactaattttgtattcgattattcacttaatccacgtcaaaaactttaacagcattaatcctaatgactacaattattcaaccgtaagcgaaattttttatctcattagaatgcttttacctctgatggtgatcttttttacaaaagaattgaatttcagtcaggagcaattcagacacgttatcgaaggcatcagcggacttttttcatttacaattgtcattaccaatctttttgtcatttcgcttagaagctacgagacaggcccgattagcgctaatatttttgaatggtttgttaaccccaatatcggttactcccatatggcctccaaaggcttcttcaattttgccaacatggtatcagccgtactctttatgctggtgcctctgatgctttacttcatgttcagtcgttttaactggaaaatcgtcactttgaacgtagttcaagctttagcgatgatcgagttaggaaccaaagtggccctcatcggtttaatcggtggcgtgattatcagtattttgctgtatgttttccacttatttattgttaaggatgttaacaaaaacggcaaagccattatcgtggcgcttttaatcgaagcgggcacctttgccatcatcccctttggtccagcaatccagcgctataattatgaaaaatatttggctcagcaatccgatgattctttgacacaggccaagcgagaattaaatgctggcttaaaaaaatatcctcaaggtaaacagcgcaaggaatttttaacgaatttcatcggcaatcattatcaagattacgccttaaataagaagtttgtttttaaaagctacccttataaatacgatcctgaattttggctcaaaatcatgaacgagccaggcaccgctagaatgcaaaatcgacatgtagaaaaagcgatgcttgatcaagttgtgaagactaacaataatcgactcgacaagttcctgggcatttcttacacacgagaaaccaacattttcaaccttgaacgtgatttcactagtcaaatttattcacttggttggatcggcatgctgttgttcattgggccttatgtcattatcctgctctacgctttaattaagtggctaatgaacaaagaaaagcggacttatttgatcagctcaatgttgctttcaatcgcctttatgattttcgcagcattctcgtcaggtaacgtaatggacttcttaacagctagcttcatcctggctttcgttgaaggcagcttgttagctagcgtaaccagaaaagaaaattaaacataaaaaaagttaggtagttgcttgcaatgtcattaagttaagacattgacaaattgaatctaatctctgtagaaccgaatcattatgatttggttctttttttgcataaaataaaggcgaaaagaacctaccttttcgccctctgattaaattattaaaccttcaaaattattgccagaaagctggtgttaattatgaaagcccttcacagaaatattttagatcgtcttgatcaaattatcaatgatactggaaagcatattcatgattttatcgatgatcctcatgccttcactaggaagcggtttttagatgcagctacagtcattaaaactactattaatatgcaaggaaaagatttgaccagtgagttgtttagagcttttggccaaaaagctattaaaaataacgataaagtagtcagtacttccgcttatgtccaacgcaaaggtcagctttcacccgcatgttttaagcatattctaactgtatttaatcagaatttatttaatatccagttatttgatcataaatatcgtatatttgccattgatgggtctgattttaatcaaatctggaatcctaaatcagagaatatcgttggaaatctcaatcataaaggaaagccatattgccaaattcatgttaatgcactctatgacctgttaaataatacttatcaagactgcatctttcagcctaagtcaaagatggatgaacgtaaagccgccgttcaaatgcttaaaaagctaaattgcggaccatatatagttactatggatcgaggttataccggctttaacatgattgaaaattgtaatcgcctgcctaactgttattatgtcatacgtactaaaacgggatatggcgcatttaaggaagtagctgagttgcctaatcaagagtgtgataaggatatagcttgctgggtgactacctctaattattattatgaaacccataaggctacagaaaacgttcatttggttaaccatcattaccgtcaatatataaaatatcggtctaaaaataccaaagatggcagctgggactttggagagttatgtacaataaaatttcgtgcctgtaaatttagaattaatgatcctaaatcaggcaaagaagaatgggaagttgttctaactaatctaaatagagccgattatcccttaaaaaggatcaaagaaatctaccatttgcgctggggcattgaaacttcattcaaaaagttgaaatatgctttaggtagcgtacagtttcattccaagcaggatagatttattgaaatggagatctatgcccacatgattatgtttaacgcagtcagtcaaattgatgctcaagcatatgtaccacaaaaaaaatgcaagtatcaatatgcgatcaatttcaaacagtcatgttttgtcatccaggctatgtatataatttcttcttcaactgaaatctttaaaaagattcttattcaaattagtcattacacaattccgatcagaccaggacgaaaagacaaaagaaatctcaaacccaaatcagctgtatattatttatatcgtgtagcctaatttctaaacaagatttgggtttatttggcatgaaaaaagagcattcaaatgcgataaatcgcaaatgaatgatcttaaaagtccaagtcgataatttgtcaatgtcttaacttaatgacattgtagttgcttgcctaactttttcttagtttttaaacattatttttcttgcttaataaagcttgaatctggcacccgaattaagtagtaccgagttgctaaatgacctgcatgcatcccgattccattttgccaattccgcttgtacttagccgtataaattgccacgtaagcacgttgatactttttatccattttagccaattccttttttacataaggaatcttctccgcattcacgtcaagcgcagtgttaccataagcaatcgaagcatagtcactaccaatcgtgaccttgctgccatcgcgataaaaagtataagtttgtgagccatatctcttcttagcagaattaatcgttacatagcttgaatttcccgcacctgtacgcattatcagtggctcatacttcacgcttgaagtaatgcggtttgcatcttccaggtctggattgtccataaaagtctgattaaacatccaacctgcagctaataaaagtactacaatttccacaatattaagagccatattcggccaactaaagcgtttatgctgtttgataatcatcttaatccgtctttgacggatgttctggacgatgaaaactaaataaagaatgatggcaacccaaatcaggatcccaatgatattccagctgaacatatctcgccctgctatataaaacatagaaacatgcagaagttttcatatttctacatgtcagaaagaaatatattttcctttctttgtcttatttactgctgtcttcatcagtattccgatattccatctggggagtaatcgcattgactaactcttgcagcttaagggcttagccagcccattgtttttattttgttaacgctagtaaatttaatactgcattgtcatcacgatcattgctatagccacattcataacaaatgtattcattatgcttggtgccatgttttttattgccctgcagagtaattttgtctgcaccagttttgacatagccacaattggcacatctttgtgttgatggatatgttttatcagctagaattaattctttgccataccattcacacttgtaagtcaagacttgtctaaacttgccaaatagtgacctttgcatgcctttggaggctacatgggtcatcatcatttgtttgacattcaagtcttcaatgacgatttggtcataattgtttacatgctcagtggtaaatttttgcaaaagatcattctgaatattggctgctttgcgataatcacgctgaagcttggttctcacttgcaggtaattattgctttggcttgccgatttaccgttaactcttctctttttagacaatactctttgataatgcttgattcgcttgtacagtttctgtagttttgctggcaaaacattaatcttgccttcagtgtagttgaaatgcccaacgttgacatcgatggcggtctttttgccagttttagcctttagtccagcctcttcttcataggaaagggcagcgtaataatgtcctctttctctaaagatgctggcaattttaacctcttccatctttaatgcctcgtatgctggaatatcaaaccaagatttaatccctctaggcttatctaatctaagcttgccattaattatcttggcgcgatcagttttaaagccttgacgtggagctttcttagatttgaaatgcggcttgccccaatcaggctgggtcttgtcaaagaagttcttccaagcattagccagatccttgactgctaattgcagacagcgagcagacaaagcaaattgccaatcagccttgttattgactaattcatcccacactcgatgctcattaggactaggattattatccttgtctaaagtccaagcttcatacatgtcttgccaggttgctaaagctagattccagcagtatctgcgatagttacaaagacgttcaagttctctttgcattatcttatttggccttaattcgactacctgagttttgatcatttgtttcacctccaatgcaaacataagtttagcaaaggatgtaacaaaaacaagcgaacaaaatattaaatttttagcagcagttaatttgcttctatgttttgcctttctgaacaaattacctgtatctttttctatattgccattaaattctatatttcagctaaccatttaatcctcctttttttcaattatatggtaaaaaaagcaaaatttgaataggataataattgaatacttagttaaatagtgagaagatcttactagtacattagatttattagggaacattatggtagcaatagctttttattcaattactgggcaaacggaacgttttattaagaaaactcaactttcggcccatcaaatcgacgatgccaaccctaagtatgatatgggaaaatcttatatcttaatcgtaccctcatatcaggacttcatgatggattcagtcgttgattttttaacgtataaagataacaaaaaaaatattatagggattatcggttgtggcaaccgaaactttaacgacctctttgctcaaactgccaaaaagatcacggcaacattgaaagtgcctattttgtatcttttggaatttagtggtactaaccaagatgtcaaaaatgtacgaaaaatcgtacacgatctttctgctggtgagagtactaagcaagtccaaaagcctaaggaattacgtgggaatatcagctttttgagtgattttagagattaaatatgactgaaaaatattacaaagcaattaactggaatgacatggaggaccgggttgacaaatctgcttggtcccgcctgaatgatattatctgggaaccccgtaatgttccagttagagaagataaaaaagaatttttacaattagacaagccggtgcaagatgccttgcttcacgcattcggagcactatctttttcatctggactccaaatgaaaaatgggctagagcaaattaaggtagatgccatcacaccagaggaagcagctgtgctgaatgccttgcaatatttggaatctattgccaataaaggctacagctacgttatcaacgagttgacggactcaaatatagcaaaagacgttattaactgggctgatgacaatccttacctgcaaaagaagattcggattttgaataaaatctaccaaggcggggatgcactacaaaagaaggtagctaacgttatcctagagacagctctctatcattctgccttctacgctccgctttatttattcggacaaggcaaaatggtacgaacagctgaaattgttaagttagctttacgtggcacttcatttagtgggatttatcctggttacaagttccgcttaggctaccaaaaattaggtaaaactgagcaagcagagctaaaagaatggatcgataacttgtacgatgtgctaattgataatgagaagaagcacattgagttaatgtacaagggcactgactggatcgatgatgttacgcactatctctactacagtgtcaacaaggcctacctcaacctaggtttttcagccaagtatcctgacacttctgattcaatcaaccctattattgaaaaaggggtcatcaagaatgcagtgcttgaagacttcttcttctacactaacgatcactcgctgactaagtttaaagaaattaaataattacaaaagacgcaatcgaaaattcggttgcgtctttttttacttcttagtagttttcttggttgcctttttagtagcggttttcttttctgcttcctttttttcaggcttcttatattcacgtattgtggttagcttttcaataattgcctccaccagttgatcaacaatcttcgctggatcttgttcgatctctacttcactggctaattgatcaattctaaagcctgaaacattaacgtattcagagcgcgtttcaaagtaaacatttaaaggatattccttaccctcttcaaagaagttagcaactcgtttgtaattgctataaggcaaattgataatatttgtctccaaggcaaaagtagccggccgctgacccgtcactgctagttgcgtttggatcaatgaattatgcttaaaagcagcgataacttccttgaccatcttttcagcatacggcttgattttgctcttcgacttgctaatgtcggcatatttaactgtttcaagatcttgaatataatcttgattttcaattttttcgttgagatcttttaaattaatttccaaaataaactttcctttttcattggttataattacaaaatactacaaaaaaattttttgtcatcctttttaaggattcaattcagtatttttagctttttatttgttaaaatgacactatgaaaaagcaaaaatttgatcttaagtatttatttttactcattcccattacgttaattctcattataggattgatttacctttttaacaaaaataaaatcgataatgaaattaattggatgacaatgaaggaagaacagcggctcaatgtcccgctagaaaatcaactgcccgatctacccaacggctgcgaggttactagcctatcaatgttactgaattactatgacattaaggttaacaaatatgatctcgccgataatattgctcatgttgattctttcaccgacaacggtaaatatcgcggcaaccccaatcaaggctttgtcggccatatgtctgtcgctaatgctggctggtgcgtttatcatgggcctttatttgacgttgcacgtaaatataccagccacatagaagatgcctctggcagcaattttttagcgattctcaagttaatctccgatgggcatcccgtgctgatcattaccacaaccacttttaatcatgttaacaatatgcaaacatgggaaaccaatactggtaaagtcaacgttacaccgtcatcacatgcctgcgtgatcacgggatacaacaagcaaaagaagcttgtctatgttaataatccttacggtattaaaaaccaaccggttaattggcataacttagaattgagttatgaccaacaaggacgccaggcactttacatcaaataacaaaaaagtgtctgggaaaaaaatagcttccagatgaataaaaacgatcaagatttccttttttaagaatcttgatcgtttttttgttctctttaaaatttttaacaataaaaatcggcccttcagccaccttctttgacaatatttgttcaaattcatcatcataaaggcaattccgatatcggtttcgaccttctctttacctcgcaggtgcgttctgcgcatgccaaatacgttcttcaaatgtccgaaaactggctctacatcatattttctcatgccatagatgtgtctgccttcttcgctttggagaacttcttttgctttttcttttaaatattgccagttaggattatagcgaacttggcgctggcggccgctagctgttttagccaattgttccaattctggcgttagctggaactcgtctgcctcataaaccttaaaatcacggacctgaccagtagaacgatccttgcgctggctgtaatatttgaaattgaatctgacgccatgatgatcaatgtaataatcatctttttcattgtagtaccagttgattagcttagttggatcattcttatactttttggtctgttctttttcatacatagtgtagggaataaagtacttcttgtctggatatttttcctccagcatcgaataattgtattcactgccatagccagcatcggcgacgattttgtcaaacttgtccaacacggtcatttgatccaaaaccggctccaaagttttgaaatctgtcggattaggaaagatggcataatcaactacatattgatcggtcgtgactgcttgaatattgtagccaggctttaattgaccatttttcatgtggtcttccttcatatgcataaaggtggcgtcatgatctgttttggaataactgttgcgtccggcaaagatctcttcggcttcttcatatttttgcattcttggcacataatcttttcttagccggtgcagaatcttttttagtccacgtcgcttggcttttcgaggtgaaccgccaggaatggctttgttttcctgctcaatctctttagtcagcttgttaatttctgcttcagtttcttgagctaattcctttagcccctgactagtttgaactttttctttttccatttctttgactacttctttagtaatcaattcatcataaagttcaactgcctggcctttcagcttttcatgatacttttcaaccgctttgcgccagacaaatgtatagcggttagcatcagcttcaatcttagtaccatcgataaaagcagcaccttcattgattaagccttcatcttctaacaggttagtgaagtagataaagctctttttaatcagttcattggcatggctgcttgatctaaaattattgatagtatgatatgaaatcttttgctggtcagccaagatcatcattggcagattttcttccagcatcaactcaatctttctgccagaaaaaactcttctggagtaagcaaaaagcagtattttgagcatcatggctggatgataggctgggcggcccgttttagcagtcttgcctactaaaacatcttctggaattgaatctacaaaccagctgatgacattagccaaatgattggccggaatggcaaaatctagattaagtgttaaagcagtttgacctgtgatataattcttgtacatgttagtttccaccttttttattttgtgatgatttaataatatcaaggctggagctaaaagtatacaaaaagagcgttgaaacaaaaattcaacgttcttttttcatgatctgagacttagttttttcccagacacttttaactcaaggcacatgctcaaagcatatgtggacgtttaaactgttcacatcagtgcgtccaacatcagcacttcccgtgcttgccacttaaggcggatgtcctctatctcataaatatacgcatctcgcgttcattaatcgactcgtcagtcagtaattgtactattttttatgtttgatgtacagtctagcacttttaaaatgacgatatttaaatttataaaaaacttcagtacacatagtcgataacatgaaacctaaagcaatagcaccagtaacaattgctactcgtagaagcaaattctctccttgactataatcccccacaactaaagcacgtactgcttgataagcaggcacgcccgggactaacggtactaaggcaggaatattaaagaccgtcactggactttttttaatgcgtgcaaaacacaagcccaaaatacctatcaaaaaggcgccaattaaatttgaaatcattcgcccaaatcccaaattaaagcaagtccaatatgccatccagcccactgtgccactgactcctgacaggtgaagatcgcgatgcggtacattaatagttaatgcaaaacccaccgaagctacataagaaaaaatgacattaataataatttctaaccaaagtggcatttttatactcctatgaatttaagtacaagtgcaactccaccgcctaaagctaaagcggttaacacagcctcgcacattcgcataatccctgataataaatctcccatgaatagatctcgcaaagcattagtaattgccaagcctgggactaaagtcatcagagcgccgatcaaaatattatcagtaatcatttgtggattaaaatgattgaataatactgccaagatccccatgaccattgctgcaattagctctgataaaaaacgaatcttagtatattttttaaactcataatacgaccaaaaaccaacagcccctactaaggcagcacctgggaaatcaacccagtcgtaattatccataaacaaaaccatcaaggtagcagacaatacagcagctcccaatacctggagccacattgggaaagtaggtgcttgtgatactaaagcaatcttttcttttaattcagaaagagtgatttttttaactgcaaattggcgcgacaagtcattaacccggtctactaattccaaattgatgttgcgatcacgaatttgtttcatctgacttagcttgccaccatctaagctcatgaaaacacaggttggcgtcgcaaaaacacgcggatcatcaattccggcattgcgagcaattctgagcattgtatcttctacccgatacatttcgctcccgccttcgatcattagtcggcccgcagttaaacaaatatccattacttcttgataaaattggacatcccgcttctcagacatagttttagcctcagttcatagtttcaatatcgatggtcttgtcgacccaatcaccgcggaaaaagtcacgttcgtgactaacaataatgactccgcctgggaagttaacaatcgcttttctcaaagcatccttggtatcgttatccaagtgattagtaggttcatcaaggaaaagcaaattagctggttcaaactgcatcttagctaattttactttttcctgttccccaccagaaagttcctttagtggactcattgcttgttgtgcagttaagcccatgcgtgccagcgcttgtcgcaattcctttggctttttgcgttcaaattcttcttgtaaatattggagtggagtcatgttgctattaggccaggttagatcttgcttgaagtaagccaactttgcagtaacagataactcatatgaaccataaattggctttaattgccctaacaatgtcttaagcaaggtagtcttaccaattccgttaaaaccagtaatcgccactttttcatccccaccaacagagaaattgaaggctgacttgaccaaagcatggtcgtaaccgatgaccaaatcttgcgtctgtagcaacaaattagaagcagtcgcaacatatggaaattcaaagcgtgccttgcggttgttttttggcggtgtcaaaacatccatccgcgccagctgcttttcccgtgacttagcactcttagcacgtgtacccgccttgttcttgcgaatataggcctcagtcttagcaatcttgcgttgctggttagcataagccttcaagtaggtctcacggttggctgctttttgccgcaaggcttgcttcaacgttcctgtataacgagtaattgtgccaaaatcgatatcgataatgcagttagtgattcggcccaaaaagtcataatcatgactaacgacaataaaggctccagcaaaattgttcaaatagtcaaccagccaatcaatatgtgaaacatcaagatagttagtcggttcgtctaaaaccagaacatctgggctttgcaacaacaactttgctaaaattattttagagcgctgaccaccagataacttagaaacatcgtgatcatagcctaaatcagctagtcctagtcctgaggcgacttgttcaatttcagtatcaatatcataaaaattattttcttctaaataagtctgtaccttgccggctttttctaacagggcttcgtccccgttttcggcatatttggcatacagatcattcaactctttttctttttgaaataattgatcaaaagccgtccgcaaaaagccacggatagtcacaccaggtgccaatttagcatactggtccaaataaccaacatcaattttattttgccaagttacttgaccatcatcgggcaaaatttcacccgttaaaatcttgattaacgttgacttgccaacaccattttgaccagtaacccccatatggtcttctttgttaagcacaaaattggcatcttcatataaagttttatcaataaaactctgacttaaatctttaacagttaataaactcatttttcatcccctattatttagctgattcatgttctttttcataattttggagtgcatcaagaacacgaggccaatagcgcttaggtaagatcagttgcaaacgatcatgataaataggaaaatcacttgcttttagccccgtaatcttagctagctcctgatctgtcagcttatatttataaacaatacgcttaatttcgactgatgcatgtcctctaaaataggataggccgaagaaaaagatagcaaaaacacttgctgtgatgattgctaattgcaaattcatcctgaagctgtgtagacaaataaaaatcacggcaataaaagaaatcacagctgagagtacaccgtaaataactggaaatattgattctttttcttccttttgcataatcttttcctccctaattgagacttagtaactttacgaacttagcagaaatcagccaaatttgcaagattctacgttttcactgatttttttacataagttaagtatacttagcataattaaaattgcacggagaaaaaaggaaaatgaaacaagaaaaacattattatttcacaccaattcatttgcaaattaatgacttagacgtgcaactagttttgccacaagtcgagcaagcagcagaattatatcaagctgttgcctgtgaccgtgaaaatttaggtaagtggctgccgtgggcctacaaaatgaaaagtgcacacgatgaagctaattttattaaacaaattcaagccaaaatgaaacggcagtcaatactcgttttaacaattttagtcaataagcagccaagtggcatgatcgacctgcataatttgattccaaataaaaaagccgagatcggctattggctgtcgagtaaatatcaagggcatggtattgtcacgaagagcgtaacggcgttatgccagcatgcttttagtgagtttaacctacactatattgatctgctagttgctgtcggcaatgacaaaagtgcaaatgtggctaagcgttgtggttttaaattgatgggaattgaaccacagctaattaatgggcctgacggacaaatttttcgtttgattcgagggtaaatatattgtgttcgcttgttatcaaagctaatattagataaaatatttaaacaagtgtttgagcataacactttactataaaaatgaactcaaatataataaaagtgtaaggtgatatgcatcaatgagtagtcggctcatggtcaatctgattctaatgcaggacataagggcctgacgggtagcagggaccaaaattaaacctgatattacatatctaagacgcaatggcttagttggtggcagacaccaaaattaaaccgactttaggagttcacaatttgtggactccttttttacttggaggaaaagagatgaactataaattatttaaatcagttaatttaaaagaattggggcaattacgtcggtacatatccattatttataatagtgctgatttttatgataaacattttgtaaataaaaccatcatttacactactaaaaataataaaattgaactcactgcaagaagagataactttatgcatttatgtggaatttcatatatcgaagggccaagaaaattttttaatgatgctctagatcgaaaagtacagctaaaaaagttcttattaaaaaagatggctctacttttcagaaattacaagttttaaatcaacttaaagaaatgttaggtccacacttaagattaacaggacgtggagcctttacatacctaaaattcgatcattctttacgtacaaataaaacgatcttggctcttgcattattaaataatcaaaattatatggttccaatctctttgctaaatttgaaattcatccatccatttcctaaaggagataagattattaaaatagaatctaaagatctaaatactggtaagattattactcttagatgattcgcagctaaaaccacccagtcaaatctttaataatgaaaaagataaccggcaccaataatgatggcaagaaattcagagtcttaacatcacgaatttttaataaagacaaaccggagcaagcaatcaaaaagccaccaacaatagacaattcagtaactaatggacctgtaaaaaaatcagccgacaaaaattttgctaccaagtaaatgctaccttgccagcaaaataaaaccggaacgaccgctagcatcccccaaccaaagctagcgccaaagaccatcgaagttactaaatccagcatggcattggtaaatagcatagtattgtttcccttaactgccgccatcacgggacccacgattgacaaagcaccaatacagcaaagcaaaatctcagtagctagacctttagctaaattagatttgcctgctttatcaactaagtgattaaaacgaccagcgatattgagcgcggtaccgactactccacctaaagccaagctaacaatgaacaaaactggatagtgacttttaggcatgctgttagtcacattctcccaaccgatgcctaacgctgccagtcccattgcgatgaacaaaacgtcttcataacgcttattcaatcctttctttaccaagcagccaactgtagtaccaaccagcaaagcgcaagtatttacaattgttccgatcatttttctcacctcttagttttattttaccgcagaaaaaaagtatccatctcggatactttttcatatttaccatttaaaatgccaactactactcgatgacgctgaagaactagatgaagatgtgctttcacccgtacctgaaccataaccagaattcgaaccacctgccggcttatcttgattttgatcataaatccgataattggtgaaagcattgggatcatcccacttgatgtgattgttctgatcattcaattcattttgccgcgtttcttcattgttcaaagtttgtgtttgcaaattcaggttcttacgaattttatctgacgtcttttgtagttccttagtagacgccacctgaattgaagaaccatcaatccaagcatcatgcccttgaatgtagccactctttaagctattcatgcagccacgataattgagcgccaaactaagcatatcattgaatgtcagattagttttcacatatttattgaaaatatctaccagcttgcggtaattgccaagcgtattaaccgacattgccttatgtgcaattgcctcaatcacctgacgttgccgcatctgacgaccatagtcaccacgtgggtcttcttttctcattcgaacataagccaccgcgtgccgtccatttaaatgctgcttgcctttgtggaaatcacaccagtcatacgagaagtcaaatggaacttggacatcgacaccaccaactgcgttaaccaggctttttagcgccttcatattaacttctagataataatcaattggcacatttaacattgatgacacagtcttcatacttgattcatgtccaccgatttcataagcagaatttacccgaaacatgaagtatttattttctggatcgcccttaatatctgccaaagtatcacgtggaattgaagtcattgtcgcagaattcttttgtggattagctgttgctaaaatcatagtatcggaattaccacgatcatggcgaccttcaatcccctggtcaacccctagaactaggatagaaattggctgtttattggcaattttagctgaagtagcagtgttgccgccgtttttaccatcaatcacactatggacggtaaaatacatgtgagcagcccatgccatgccaaaacaagcagttaataatactgccacaccaatcaagcgggcaaaaaagttacctgatttgagcgctgatgcatctgcggctaaagcacgattccgatgaagattaagcgatgaacgatgagcgcgataaccttctcttcgttttggattttggtccattcttttgatcgtttcccttcgaatttaatacaagttagtttatttgtatcacttttaatctctcgataaaataaaaatgctaataattaataataacttatttttttgcgaaatataacgcaacaagctaagatgtatagaaaatgaaatattatggaggtaaaaatggcaattccaactagaaacgaagtccctgaagagcttaaatgggacttaacccgtatttttaaaaatgacgatgaatgggagcaagcttatgcagctgcacaagaaaaagtggctaaacttgctgaattaaaaggtacactagctaaatcaggcaagaacctgtacgagagcttaaccaaaatcttagctgttaaacgtgatgtggaaaatatctacgtttacgctaccatgtccagcgatgttgatacttctaattcgcactatctcggctacgtcagccgggtacaaagtttggctaaccagtttgaggctgcaacaagttttattaatcctgaaatcttgagtatccctagtgataagcttgagcaatttaagcaagctgaacctagattaaaggattacgcacactatcttgaaacaattactaacaagcgtcctcatacattacctgctgagcaagaaaaattgatcgccgatgctggggatgctttaagtgtttctgaaaatacctttaacgttttgaccaactccgacatggaatacggttacgttcaagacgatgacggcaatatggaacaattatcagatggcctttattctttgctgatccaatcccaaaatcgtgatgtcagaaaaggtgcttttgatacactttatgccacttatggacagttccaaaattccttggcttcaactttgtctggcgttgtaaaaaagcacaactataacgcacgtgtgcacaagtataattcagctcgtgaagctgctttagccgataatggcgtacccgtagcagtttatgacactttaatccaggaagttgattcacacctagacttacttcaccgttatgttgcgctacgtaaaaagatcttaggcctgaaggatctgcaaatgtgggacatgtatgtgccactaaccggaagaccttctctttcatacaatttcgaagaagcaaaagagacagcaaaaaaggctttggctccacttggtgaagactacttgaagcatgttgactatatttttaataatcgtgtcatcgacccaatagaatctaaaaacaaggtaactggtgcctactccggtggtgcttatgataccgatccttatgagttgctcaactgggaagataacatcgattcactttatactttagtccacgaaactggtcactccgttcactcctggtacactcgcaatactcaaccttacgtttacggcgactatccaatctttgtggctgaaattgcttcaactactaatgaaaatattttgaccgaatatttcttagaccacattaccgatcctaagacgcgggcctttatcttaaattactaccttgattcatttaaaggcactttattccgtcaaactcaatttgccgtgtttgaacaattcttgcacgaagccgatgctaagggagaaccactgaccgctgacactttagacgacgtttacggtcaaattaatcagcattattacggcgatagcgttgaaccaggcggcgatattgcccttgaatggtcacgaattccacacttctactacaatttctatgtgtaccaatatgcgactggctttgcggctgcaacggcattagcaaacaaggtggttcatggaacgcctgctgagagggatgcctaccttggtttccttaaagctggttcaagtgattacccaactgagatcatgaagcgtgctggcgtagacatgactaagcctgactacttagaagatgccttcaagacttttgaaaaacggttgaacgaatttgaaagcttgattgagaaataaataatcgcgctcatataaaaataatcgatatcatttcgtgagatttgatatcgattttttgttgatgatcttgatttattacttggcatatttatcgctcaatatgtataatacgtatataagtattatagtgccagaaaaggtgaaaaatatggctgaaactttatataaaaaggtcgttaaaaatggttcttccttagctatcaatatcccagctaaggaagtaaaagagcaaaatctcaaagtaggcgatattgttgaagtaaaaatcaaaaaatcagaccgtcctaattctgaaaatttaaaagaaatagatggcttaatttctgattactgggatatgttagagtacttaaaggataagtagtcaatgaagatcaattatctaacagaaaaggatattttagtaatcaatgcaagggttattcaaagagaaggtgcaacgggacaaaaacctcacgttagggatgcagaagcccttcattttttagttgttcaacctaagcaaactagttttggacaagaattatatccgtcttttgctgaaaaagctgggattttattaattaaattagttaaaaagcatgtttttgaagatgcaaataaacggactacagcaattgcattcttactatttttacgacgcaattcttatgaactaacctgtgattggcaagatttagcaaatcaaatcttaaagatcgctcaaatagatgacaatgaactaaattaccaagaaatctatcaatgggttaatcaagtaattcatgaaaactaaaaataatcgatatcattttcgccctaatattatattttatatgaaataataaccactttataaaaaaataagggctattaacccttattcataataaatccatcaactatttcctatgtcatactactactcgattgtcctgcataaccagctagtgtagcctgcaagtcatgaataactttaggagcattaaaatttttagcaaattcgtactgttgcaattgataatataatctagaaccgatatataaagcagaatcattattttccgcttgatcaattgttctatccaaaattcttaccaaatttggattatcaattacatctttactaaaacgaactttttctagttcattttttaactttaaagtctcatccttcttaatcattatttacaccaaaggatgcgcaaatggtccatccttctgccatccagtatacataatacgaccaacgctatcccacatttgtgctaaattatcatgacaataatatcggttgcaatatacaccattaccatagtaatggtactttccgcctccgcgcttgtgatgtgtaccgcctaaaacttgacttaattgattttcttttagttcttgaaactttaccattccagacacctccgataaatctttaagcctgcctcacttagtacttctatcaacttacatatataagtctaccaaaacagtagtgttttctaagaaaacgtcagaaactggcaacgttcatatcatattctgttaaaatacataatttgatcaagaatttagtacctgtcgatttaccaatcaaatactccagttacaataccgttagcacccactgctgcatatctttctagtttcagctgaagttcaactatagctttaggtagttcattttcactaaagttttctttcaatttcaaagacaaattagaagcaatcgattgaattgactcatgcttatcagctttcgcaatagcagcttgtaataactcaaccaattcggcatttttcttaacttgaggatctgaaatcactgtattcaatctactcttaaatgcagcttcttctttaagattctttttaaagaacatatttatctccttgtattaaccttgatttttcagaaaatcatacaactcagtagctgtttttcctccacctacccatgcgttagcaatttcaccgtttttaattcgcataacagtgggagtacctggcacttccaagttatcaaaagcataatctgcattatctttactttcatcaatatttaaatagtataattgaccaccaatcagattattaaattcatttaaagtggctgaatattgtcgacaataatagcacgttgggcaaccaatatacaaatatctatcaatattatcttttttatcgaaaaaagaatctacttcatctgaattaagagactgtaaaatattttgtgtaaggatgaatgattccttaaatttatttctttaaacattagaaaaaggagttcctttctcgtatgattggtttgaacaaaaaaacacatacagaaagaagaactccttcatgaatgattttaccaaagattttgctcaagctctattcaatccagacaaaataaatgatttattgcgcaaagagctacaacaggctgttaataacttgttagaagctgaattgactgcctttctgggctatgatccctatgccagaaatggctggaatactggcaactctagaaatggtgcttatttccgcaaagttgatacgcaatttggcccaattgaagtgcaagtgcctcgggatcgcaacggtcaatttcatcagcacacgctgcctggctacaagcagcactcggatatcttggaaagcatgattatcaagctttactccaagggcgtgaccaccagggaaatagccgatctaattgaaaagatgtatggcagccattacagtccagcccaggtatcaaatatttccaagcagatgattccaaaggttgaggcttaccacaaacgcaagctaagcgacaagtttttctgcgtctatttggatgcgacataccttcctttgcgccgagaaacgtttgagcgtgaagcagtctatattgccattggcattaaacctaatgggcacaaggaggtcattgactactgcattgcacctagcgagaacattgaagtctggacagatatgcttcaaaacatgaaatcccgaggcttaaagcaagttgagctttttctttctgatggtgttgttggcatgaaaacagccttggccaggacttatcctaaagctcattttcaacgctgcttggttcatgtcatgcgcaatatctgcgctaaagtacgcgtcgacgatcgtgaaaagatcatgaacgaattcaaacaggtgcatcaacagacaaacaaagaagaagccacagctgtcctgcatgacttctataccaaatggggcaaggtttacagccatgttatcagaagcttgaaagacatagaaccagatctgctggtcttttataactatcccaagcagatcagagcttcaatttattcgactaacatgattgaatcatttaacaatgtgatcaagcgcaaagctaagcctaaggcagagtttccaactgaacagtcgcttgatgcttttattggcattcaggcaatgagctacaatgaccgttatttcaatcgaattcataaaggctttggtcaggttcaggacaccttagaatcctactttgattaaataaataattaaaaaatcaatttacgagaaagaactatttacacaaaagatttgacagtttcttaattggagacgctacaacttgccaatttatagctaaaatacctaaaattaataaaataaaaatatttgtatatttttattgctttttcatagttttatattcctacaaaaatctcagcagcaaaacaatggaatcacaattggtgccacaagttttactgttctaccaacatccttaccaaatttatagcaattatagcctcttttaacacctacacattctagtaagttttcatcttttaaactttcaaattttttcataattattcctcacctcgcatatttacatagtccttccttaaatccacgccaatacttaccttccgacttccaaaacttgttccatcctttactacctcctacaacacttaccaattcgtttgaacttaacttttcaaaaccaacagtattttccatttttatacctccgataaatttttaagtctacctcgcttagtacttctaagcgcatcatcaacttacatgtataattttaaccaaattaattcaatatccatgttatcgttatatattgttaacatatacatcacgcgtggtgctagttaaatcgttctagacaataagccaaattataagctaaaattgcaatttccaaccggctttgaaagcctatcagactacgtgctcgattgttctcggcattgtaataggtcagaagcgaaaagtcgctttcaattgttctgcgaatagccatcaattgatgatcattgtgctttttagctcctgtcatatttttacgatatggtgtccaaagttcgtaacccatttgttttagctgttgatgcagttctttgcctaaatagccttcgtcgccaagaagatagtaattagatggatgggtattttctatcagttcaactgtctccctggcatcatgaactgatgcctttgttacgacataatcaagaatgtaaccgtcatcgctaacaatggcatgaactttgaaaccatagaagtaaattttcttggtggccttataaccaatgttggcataaccgcgaaaaattttagcacgatagtttcgaattggttggcaaacaggtaccggaaagctgtcaatgatcaagaactgtccattcaggtcaacctttttattcatttcttgccgtatctgataaatcaattgcaatagctgacgtgaacgccgattaaaacgtgagtgtgataaacaattgaaacattcacagaatcttctttgtgattcaattcctgtcttagcttgccagataagtaaagccaaaatcagactgtccgtagttttaatttgatcaatatttcgccgatgagtaaactcagccggtgcatacaaacgataccagtgccgacaaattatcactaaatctttaaaactaacttgtaaatggtggctaaaacgcttaagcttaaggcagttcaatcagatcagactcttttctattattactatttacaagtcgagtctaacaagattggacttttttattaactaaaacgatttaactagcaccacgcgtatacatcatatttcactatgttacacaacttgataaagcatcattttactttgtatttccaaaacagtttaacaaaaaatcatcagtaatcgcgcttatacaaaaataatcgatatcattttgccaactatgatatcgattatttacatgctgtttgatattgaatttttttattttctagatcgaaccagttaagcccgcaaatttccacttatctggattctcatttaacatgatctttaacctaattagtgcctgtggtaatttaaaaccatgtactagtgaataattattcaaatcacggttcagttcaaatactaccttatcaaaattaacaccctgagttaacttgcttaaaccttgattgattaacttcgttgcatctcgatcatttacagtctcttgtcttaattcctcaagaatttttttaagattttgtccattatcttgcaattttaagtcgcttccttttaattaacctctactgccccatggtccatattgtaaccatccattggctacggtttgacccgctttaccccaaattgcaccgtaatctgggatagttttatgtgtcttagtattatacaacatatatggagttaatcgaataattttaccaccaacaactctatttagctcaatattatttactaccttaaaattcttcatttccaatacctccgataaatctttaagcctgcctcgcttagtacttctaagcgcctcatcaacttacatatataactttaccagaatagcaggattttctatgacattgtcataaactgacaatattcacatcatattctgctaaagtacataatatgaacaaaactcatttagaatttagcaccctggatctaatataattaaagtagctagctcttcccgtaataattgacacttttccctgcatcccataccgcaaaaaatttctctctgacttggtagtttttaccatagtttccacttcaaacatacttatttttttctgttgaacagggtaagtacctatattagtaatttttccattaagtatttcagatgttccctgcttattttcaatattaaacttcatacgttgacccttatctagcacagccacttcagagctaggaacgtacgttattactcttaatttctttctatcccttatatcaggcatcgcaacactattcttattatctagatgaataataacattattttctaacataccttttttgccatcagctagagtgacactaattcctttagataatttttgcccttctttatattctttattctctaacgttactacccgatctggagtaataactcccatactattcatcacattttcatgcacagcaaaaaatgatccaataaatagtaaaatcacaaaaataaaagctggtaaaattatcattgtcgaaaagttacgaaaattatatgaatagaatttactactttctaaatcttgatcattcatttaatatcacctagcttttcaccaaatcataataatacccatgtttagccattaattcactgtgattaccttgttctacaatttgaccctgattcaataccacaatattgtcagttctttcagcaatagctaaacgatgcgcaataaatataacagttttattctttaacctaattaaattatcaaccacttttttctcagtaattgtatcaagcccacttgttgcttcatcaaaaatcaataccttagcaggtgaaagtaaggccctagcaattgttaatctttgcttctgaccacctgacaaaatcttagcattttcatctaattgtgtattaaatcctaatggcaatttttcaatgtcattctttatctccgcgatttggcaagcttcttctatctctttttcagttatattcttacgacttcccaacaaaagattctctttaatggtacctgcaaaaatatatggagtttgtggcacataattcacatatgagcataaaacatgcttatttatacttctagtcgaatgaccattaaaagttacttttccttttgtgggactgaaaaaatcaaccaacaatttaaccatagttgacttacctgatccactcattcccacaatagttaatttctcattatctttgatcgtcaaattaatatcttttaagacatcttcaccatatccataacgataatcgacatgtgagaaattaatgtctccatttaaatcatgactatcattaactgaagttttgcccttaaattcactttgaactaaataaacttcatttaaacgattctgagctacatttgcagcttgaagtgtaggttgcaagttaataatattttgtaatggatcaataaaatatgataataatgcattaaatgccatcaattcaccaatagacatctgattatgcattacaacacttgcccccacccaaagaataatgacattcagtgataatctaataaaagttttcaaagcagtttgaaaagcttctgttttgctatacttaaaagctttttttaaataatcaacaaactgactatcaatttttcgataacgtacttgttcactgtttaatgctttaatcgtctcaattccttgaatatcttcaataattgatgaactaactaccgcattactttccatctggtcattatttaatctttcaaacctttttgaaaagccgagaataacaatagcatagagtggtaatgaagctagcgtaatcaaaaacaatgtcatgttttgaaccgccaaaattatacccattaaaattacaattgaaagatcaaggaataatgaaatcaccgtacttgccaatgcatctataattctacttgcatcagaaaaacgagaagtaatctcaccagtttttctggtagtaaaaaattccatcggtaattcaaaaatatgcttaatgtattgtaaattaagatcgattgataaccgctgccccaaaacattcaataaaaattgctgaccatatgaaaaaattgagttaaagacatatgcaatcaataacccaatagctaaaacagataacgtggtaaatgtaccgttaggaatatatgtatcaatcaacccttgtacaaaatatgagctacagatactaatcagtgtcatcagcaaagcagctaaaataatgtttctaactaactttttctgtttaaacatataagggaataatgataatagattattctttttctcctttacaggcttaaaatctgccttaggcaccataaacaatgtaatacctgtccactctttttcaaacgcctttttggacatttttttaattccactagtaggatcaggatcggctacgattatttttcttttagtatttttaagaactacataataatgtaacaatcctccatcttttatcacatgaacaataaaaggatattgaatatctttcatattgaataaggacatatctgcttttaccgcttgaacatccatattgaatttttccgcagttttaactaatcctaaagcagtagttccttcagtattggttttagcaatatgacgtaaatgtgctattgatacttgagaatgataattctttaagatcattgctaaacaagctgcaccacagtctgtttcatcgatttgtggaacataaattgatttatacgttaacatgcccatcatttatctctttctgcttagctaatttctctgttttataattatatctagcaagaaaatctttcatcattttcacactactacgtgaaaaatcttcaacatccccattaacaaatgagacacgatgctgtttcaaatcaatcgactcaatgttcttcggattcaccaaacaagactggttaatcttctctaacataggattttctttagcatattgattaatactacctaaaagttgcatttcacctgtcgtcaagatcattaataacttgtgcggggttatagttgttgaaatataaataatatcatcaatattgacattcctagtttgacgtccaattttatacgaaaaagtcattttcttcatataattgaatttgtgtaagttgtagatagctacttctacagtctttaccatcatctgtctaaatttatccaaatcagatgtttttacaatgtagtcaattggacctaatcgtcttctgaatgtaattaatgataagtctgcatgactagttacaaagataatttgagctcgttcatctcgctttttaattaaggcagccagatcaaagccagtatcttcttccgtatcaccgcctaattcaacatcaagaaagtagataccaccatctaatttatgtttcttcagataatcaattgcacccatgtaatcagttgcagatgcaattgaaaattcaatttcttcatcatctgacaaaatcatttccgcagcaccaagaattttcttagtttgctcaatttgattttgatcatcatcacaaataaatactggatattgcattttttatttttcagtcccactttcactatcaggcaaaattgttaaatcaaaagtaaaccacccatcatcaacatagtaattaacaatcattgaatcttcatatttatgagtaatttcttttacattcgctagtcctaaacccatatgatgtttcttggttgtataattcttttgacttattttatctgtcgctactccactttttctaacgcgatttcgaatttcaaactcgaaatcgccgttttcttgataatacattgcatctattcgcgcactattagagttacctgtttctttgatcaaggcctgactttcttctgcagcattatcaaacgtgataccaattattctgaccagatctaaaatattaacactatcaggaattcgagaaatgtcgtgttcacaatcgaaactataatctagacctaaactgtagagttttgataacttagcaattgcaatactttttagattgttttcatggatatgatttacgcccttatacttacgcaatgcttttttattaaactgtgtttcagtgtagtgatcgagaattttaacaacctctttagagttaccttcttgagcgcttacttttaaaccatttaaaacattttgataatcatgcttaaagcgacgcaaatcatcttcgtttttgtcaagataacttgaatattcccgtagttgtttcatttcagaactcaattgctgctgcttaagaatcaattccttgttttctgcttcttttgctttcctgtcagcgtttgccaattccagctgcaattgttgttccttttgctctcgtttggttagaagatctttttgaattttaacagttgtcaaataagcaaatacagaaaaaattatttgaagtatcaataaacttaaagatacttcaaataataccgtcatatgtgtactctgtaatgctaaaaaatacacaatggaacttgataaataaacatataatattaatccaataaatattgaattatttcgatcatttaaaagctttcgaattttcgaaactgtcaaatcttttgtgtaaatagttctttctcgtaaattgattttttaattatttatttaatcaaagtaggattctaaggtgtcctgaacctgaccaaagcctttatgaattcgattgaaataacggtcattgtagctcattgcctgaatgccaataaaagcatcaagcgactgttcagttggaaattctgccttaggcttagctttgcgcttgatcacattgttaaatgattcaatcatgttagtcgaataaattgaagctctgatctgcttgggatagttataaaagaccagcagatctggttctatgtctttcaagcttctgataacatggctgtaaaccttgccccatttggtatagaagtcatgcaggacagctgtggcttcttctttgtttgtctgttgatgcacctgtttgaattcgttcatgatcttttcacgatcgtcgacgcgtactttagcgcagatattgcgcatgacatgaaccaaacagcgttgaaaatgagctttaggataagtcctggccaaggctgttttcatgccaacaacaccatcagaaagaaaaagctcaacttgctttaagcctcgggatttcatgttttgaagcatctctgtccagacttcaatgttctcgctaggtgcaatgcagtagtcaatgacctccttgtgcccattaggcttgatgccaatggcaatatagactgcttcacgctcaaatgtttctcggcgcaaaggaaggtatgtcgcatccaaatagacgcagaaaaacttgtcgcttagcttgcgtttgtggtaagcctcaacctttggaatcatctgcttggaaatatttgatacctgagctggactgtaatggctgccatacatcttttcaattagatcggctatttccctggtggtcacgcccttggagtaaagcttgataatcatgctttccaagatatccgagtgctgcttgtagtcaggcagcgtgtgctgatgaaattgaccgttgcgatcccgaggcacttgcacttcaattgggccaaattgcgtatcaactttgcggaaataagcaccatttctagagttgccagtattccagccatttctggcatagggatcatagcccagaaaggcggtcaattcagcttctaacaagttattaacagcctgttgtagctctttgcgcaataaatcatttattttgtctggattgaatagagcttgagcaaaatctttggtaaaatcattcatgaaggagttcttctttctgtatgtgtttttttgttcaaaccaatcatacgagaaaggaactcctttttctaatgtttaaagaaataaatttaaggaatcattcatccttacacaaactattttacagtctcgaatttttaaataatacttttggattatacttatagttgcgatatctagaattaaaaaagtccaaataacactaccaacattaataccaaaaaataatgatattatttcaacgccaatagtcgtaagcaaatctaccatttcaaaaaataatattgcaccaatatttgactttatccttttatctctttttataaaatatgagaataaaagaatacatatgacttgaaaaatatctactacgaagtcatttattttagcggtgaagctagttgtaaaacaagctaaaacaaagaaaatcgtaaacactaaatcttttttttggaatttccaattagataatttataaaaaatacgcgtggtgctagttaaatcgttttagttaataaaaaagtccaatcttgttagactcaacttgtataatcaaatagaaaagagcctgatctgattgaactgccttaagcttaagcgttttagccaccatttacaagttagttttaaagatttagtgataatttgtcggcactggtatcgtttgtatgcaccggctgagtttactcatcggcgaaatattgatcaaattaaaactacggacagtctgattttggctttacttatctggcaagctaagacaggaattgaatcacaaagaagattctgtgaatgtttcaattgtttatcacactcacgttttaatcggcgttcacgtcagctattgcaattgatttatcagatacggcaagaaatgaataaaaaggttgacctgaatggacatttcttgatcattgacagctttccggtacctgtttgccaaccaattcgcaactatcgtgctaaaatttttcgcggttatgccaacattggttataaggccaccaagaaaatttacttctatggtttcaaagttcatgtcattgttagcgatgacggttacattcttgattatgtcgtaacaaaagcatcagttcatgatgccagggagacagttgaactgctggaaaatacccatccatctaattactatcttcttggcgacgaaggctatttaggcaaagaactgcatcaacagctaaaacaaatgggttatgaactttggacaccatatcgtaaaaatatgacaggagctaaaaagcacaatgatcatcaattgatggctattcgcagaacaattgaaagcgacttttcgcttctgacctattacaatgccgagaacaatcgagcacgtagtctgataggctttcaaagccggttggaaattgcaattttagcttataatttggcttattgtctagaacgatttaactagcaccacgcgtataaaaaataaataaatctactattggtgaaattaatccctgtatcgctatcattactttaatccaagaaactttttccaattaaagtgaaacaatgggcgttttgacttattaacaatattattcattgcaaacaaattttgattaaaaaccatattagtaatagcaaatccacctttaacctcaactagctcttcttcattcaactttttcattatttatgcttcctttcaatttaatgcactaacaatttttacactgttaatgttactacgagcgcaactttatgattaaaatcgtcatattctgtaccatttagatcatattctgcattttcaattaaaatgctcctccaccagaaccatttccccaactattcgacttcttcttgaaaaaatagcgtttagattttgatcgtccacccacaatttagacatgaactagatagcttccgcatattttctcttcccttcatttaccattttgttacaaataaaagcataactctatctagcttctcaaaattaagctcatcagattttgcattatcctaatcatattttgctaaaaataatcaatcctctttctcctctggccaaaaaagatcatctaatgtcttatccagcgcctggcaaatcctgatacacaagttaaccgacgggttataatttcccttctcaatcgcagaaatcgtctgtcttgaaacatcaatctgctgcgccaaatcttcttgcgttaaatctttaccgactcgcgcagccttcatttttaaatttttcaatccttatcactttccttatcacgatggagttgaaacaggcttactgctccaataatcaaccaataaatccccataatgttcagcgcactgttaaagtcatcaatatatcctagaatcaagcaaataccaagtaaaatatatagccaactatttgccttaacatgctcttcattaaatgcaaaatatgctccatggactatatcgtaaactgacatcaccgttaatgacaacataataattgcaaagttaacagcaataccatgctttgtataaaaatccgtctgcatgaataaagcagaaattacttctccaacgattaacacaagaaagctatacctgtcaccacgaccacgaatcaattcctgtcgttcatcatactttgccgcacgacgatttcccacgaatacaacgactaagatgaaagtcataactgcaaacaagcttgcaaaagccattaattttaatatttcaaattttgacattttacacatccctttcttttaatagtttgatattaagcccatattttcaaaatgtaaagtatgttttacatttttactaataaatttgtatttataaaaactagcattaacataatcggtatcatttcactagatttgataccgattatttgttaatgatacctatttttcaaaaatttccttgacttcttcttttaatcgtcgtattataatgacaattaaattaataaaagcttagaagagatgagtaattacttaagacttctgcagagagtcggagttggtgcaagccgatgtggttgagagtaatgaatatggtcttggagctagtttaaagagcaagctgttaagtaagcaatttacgagtgacgatcgttaccccgtccgagtattcccaattttgggagcacttagtaaggagttagttgtgaagctaacttgaatttgggtggtaacacgcttaggcgtccctagcatagaaattctatgctaagggcgctttttattttgcttatttaatttttcagaaaggagccagacaatggataaacctatcaaaactacaagttcacaaatcatcatcagtaaaaaggcattcaaccgaatgtgcactattgtctggttgatcttgatcatcatcggacttttcatcgttaaataaaacatcgaagcaaaactaaggagaaaaattatgacagaattacattacgatatcgttggtagctttttaagacctgcagaattaaaaaaggctcgcgcagaatttgaagaaggaaagattaagcaagaagaattaactcatgttgaaaatacagagatcagagaattagttcaaaaagagattgatcatggccttaaaatcgtaactgatggtgaattcagaagaagttattggcatcttgataccttctggggctttgggggtattaaacacactaagcaggcccacggctatttcttccatgatgaagaaactcgtaacgactctgcccaagttgagggaaaaattaaatttactggtaaacatccagatctttcatcatttgaatacttaaaaaaggttgtcgatgaaactggcgctaacgtaattccacggcaaagtattccagctcccgcacaattttacgcagaacttgttcgtggagaagaaaatattgccgcacttaaaaagatttatagttcagaagaagatttactcaccgatatttctaaagcataccgagacttaattttagccttatacgatgcaggatgtcgcgacattaaactcgatgactgtacttggggtatgattgtagataagcgctattggaaaagtcatttacaagatgacttttcactagacgaccttaaaagaaaatacttgaagcttaacaatgatgcaatcaaagatttgccaacagatttgcgaatatcaactcatatttgtcgcggtaactatcactcaacttgggcagcccaaggaggttatggtccagtagcggactatgtttttgctaaggaaaatgttgacgccttttatcttgaatttgacaatgatagatctggcagttttgacccaattgcacaaattcctaacgacaaacttgttgtcttaggtttagtaactagtaaaaaagcagaattagaagatccacaaaaattaatcgctagaattaaagaagctgctgaattccacccactaaatagtctcgctttaagcacacagtgtggcttcgcctcaactgaagaaggcaacacgttaaccgaagatgaccagtggcaaaagatcaagttggttgtcgacactgccaagcaagtttggagctaaatggcaattaactagttaaaataaagataaatagatttagacaaaggagaaaaaaatcatgggaaaagttgaaagttttgaattagatcatactaaagttaaggcaccttacgttcgtttaatcactgttgaaaaaggccaaaaaggtgaccagattagcaacttcgatttgcgtttagttcaacctaataagaacgccattcctactggctgcttgcacacgattgaacaccttttagccggtcttttacgtgaccgcatcgacggctacattgactgttcaccatttggctgtcggactggcttccatcttttagtttggggcaccccatcaactactgaagttgccaaggcacttaaggagtcattagaagaaatccgtgacaacattaaatgggaagacgtaccagggacaacgattgaatcttgtggtaattatcgcgaccactcattattctcagctaagcaatggtcaagagatattttggctgaaggcatttctgatgacccatttgaaagacatgtggttgaataaaatttaaaggtttaactgaaaaatagtaaataattaaaaaagctagcaattcattttagtgaactactagctcttattttttcacttatatcatcccggcaactaagccaactatatacaagaagacacagcagactaccaaatacaaaccgccccacttgaccgtttcttttaggatctcgccttcgtctccctcacgattaattgagccggttgctactgcaatattctgcggtgaaagcatccctgccgtggcccctgtcatgttcgaggctacaacccagtacttacttacgcctaagtccgttgctgcagtatactgcaaattaccaaataaaacattagctgatgtagcagatcctgttaaaaatgttcctagtgcaccaattaacggcgcaaacaatggataaactggtcctaaaaggccaaccaaggccactgctaatgcattcgtcataccagcataaaccattaccttagccaagcctacaatcgcacaaactgtaattgtagttttccatacgctttttatcgattgtcctaatatttgcatcatttttttcaagctgacaccctgaatcgccccaccaattaatgtagctacaaaaattaatgttccaggagaagataaccaactaattgacaatgtatttgggttctttcctgtataaacaacaagattagtggttactttattaagtacatcattgacagctggaactaatgaagaagcaaagatcacgaagataaagaccaaaataaatggtgaacatgccttgagcatttccttagcatttggacgtaaaacatctggctcttcttcatcatcatgccatctagttaataagactgtaatcgcaattgaacacaatgagccaacaattgcaggcaattctgcccctacaaattttgcagctattacctggggaatagccattcccagtcctgacatcaatgtaataaagcctacacctttaattgccttaatgctgccttcagtcaagataactaaaataaatggtaccagtattaccaaaatagataattgcaatgttacgatgaaggatagtttttcttgatgtagacccgtcacttcagctaaagttaaaactggtaatccaattgcaccaaaagccgtcgcagttgtattagcaatcaaactaatgactgacgcgcgaatcggatccaagccaaaggcaatcaatattcctgccgcaattgctaccgcagtcccaaagccagcgattgattctaaaaagccaccaaatccccaagcaataatcaaaacaataatccgcttatcggttgaaatcgtcgccagcatattttgaataatttccataccgccagattctgtagtaacgttatatgcaaataaagccatgacaataacaaacataatcggccaaatgcccatgataatgccttctagcgccccacttgccgtatctagcaccggtactttaaaactaaagactgctaacaccatcgtcaaaattaagccaatgacacaagcgcgtgcagctggcattcgcataactcccagcgaaataatcaaccaaacgatcggcaacaatgcgatcgcaaatctaatccacatcaaaatcctccatcatcaaaagtgttgtactatattatttaatcatgatttgggtaaaaagttaaaataagacacaaaattttagtttaaattacaattttcacaaatttcacttgcaagtttaaccaacaaactatataacaattaatggaaagtaaaatttctcacatcatgtttgaactactccgtggaatagagtagttctttttttgcgtaaaaaaatagccagaccgaattcagcccaatgtcattaagttaaggcattgacaaatgaagctagactttttatgaatcgaatcatttggattcggttcttttttttgcaaaaataaaggcgaaaagacctgccttttcgcctgctcattaaaattttaaaccttcaaaattattaccagaaagttggtgttaattatgaaagcccttcataagaatattttagagcgtcttgatcagattatcaataatactggggaacatattcatgattttatcgataattcacatgcttttaccagaaaacgcactttagatgcagctacagttcttaaaactacgattaatatgcaaggtcaaaatctaaccagcgaattatttagagcgtttggcaaaaaggcagctaaaagcaatgccaaagtggttagtacttccgcttacgttcaacgcaaaagtcaactttctcccgcttgttttaagcatattttgactgtttttaatcaagatctatttaatattcaacttcttgatcataaatatcgcttatttgccgttgatggttcagattttaaccagatatggaatcctaagtcaaagaatattgttcaatcttcaactcataaaaacaaaccctattgtcagattcatgttaatgccttgtatgatttgttagataacacttatcaagattgtgtttttcagcccaaatcagagatggatgaacgtaaagccgctgtacaaatgcttgaaaaattgaattgcggtccatatatcgtaacgatggatcgtggttatacgagttttaatatggttgaaaactgtaatcgtctaccaaattgtcattatgttattcgaaccaaagcgagttgcggcggaattagagaagtagctgcactgccagatcaggagtgcgatactgatatttcttgtaaagtaactacttctaattactactacattacgcataaagatagtgaaaatcttcatcatgtccagcatcattatcaccaatatattaagtatcgttctaaaaacacccaggatttaaactgggattttagcacgttctgtacaataaaatttcgtgcttgtaaatttaaaattaatgattccaaatcagataaagaagtgtgggaagttgttctgactaatcttgatcggaaaaattacccgctacacagaattaaagagctttatcatttgcgttggggtattgagacctccttcaagaaacttaagtattctttaggcagcgtggagtttcattctaagcaagataaatttattgagatggaaatttatgctcatatgatcatgtttaacgcaatcagccaaatagatgctcaagcctatattccacaaaggcattgcaagcaccaatatgccatcaactttaagcaatcatgctttattattcaaagcatgtatcttaattcttctttatctgagacttttgaaagaattttgattcaagtcagccattacacaattccgatcagaccaggacgaaaagataaaagaaatattaaacccggatttaaaattgaagtgcaacactaagtgttaaacaaaaaggccatgaagacctaaacttgaagtgacgaaaaatcaagaaaggaagatcttcatgaccaattcaaattctagcatttctaagcactatcatcaattaaccagcgtacaacgtggacaaattcaagcaatgctggattccggcataacttcccgtactgttatcgctcaagaagttggctgccataagtcgacaatcagtcgcgaaatcaaacgcggaagcgtcctgcaaagagacagcagctatttattgtatgagcactattacgctgatactgcacagatttattatgagaagcgtcgcaaaaactgctatcagcgcaatccattgaagcattatgctgtctttttgagaatgctctccagacgctttaaagctaaatttgatgccaccagcatcgatgagttcgttggtgaattcaaaaggactatgccaggctacccttgtcccagcacaccaaccgtctatcgctatattgatcagggcttgctggacataagcaatattgatctgcctatgaagctcaaaagacgcaggaacaagcgtcatcacagccatggcggtcacgctttgcacaagaagcatcttggcaattccattgaacagcgtcctaaggaggttgaagacagaaaagctccgctgcactgggaaggagatctggttaaaggcgtcagacgcaagaatcagcctgctttaatgactttgactgaaagaaccacacgctttgaagtagttatcaagattcctgactatcgggcaagcacatgccaaaggctgcttcaaaaggagattgacagacatcctgcctggtttaaatcaatcacgtttgacaatggctctgagtttgcggatatgaccaagatcaagggctgccagatttactttgctcacccatattctccatgggaaaggggcaccaatgagaactgcaatggtcttttgcgtcaattcttccctaagagcaagagcatgaaagacaagtcaaaagcttatgttcaacaggcaactgatgccattaaccacaaatatcgccgaatcctccaatatcacacagcagaggaactcttcaagcaatatatctcttcataacctaactgttgcacttaatttgacaattcaggaagaaatattaaacctaaatcagctgtatattatttatatcgcgtagcttaaaatataaaatctgttctaagccttatttgtcgtacaaaaaaacaccaatttaacaaatcaaatgttaaatcagtgctttaaaaggttagtctcagttgtcaatgtcttaacttaatgacattggttttaaactagcgactttttttaattgtttagaaattatctaaaaacgtaggaatgtaatttaccttgatttcagttttgagcttattaatatttggctctttggctgggatgatatttgaaccccaatttgagatatagccttcaagctttggaatacgtacttcatcaaacttgcttttagacggtacccactctttttcccaagaagatttatggtttaccttatcaatttttccatagttataataattgattatctgcttatttggcttaaaagcggtttttccgtctgcatacttaaagaacacaatctgtgtaactatctttaaacgcttaatctttgaatagttatgttctaagtgaatttcataatcattattatctgctttgaaattctgattcttaaaatcattagactttactacatatccaagaccttgtagatgtttaacctcatcttcaatatcatatgggaattgaatacgagtacctgtctttccatatacctcttgataatcaacgtttttgttgtctacatcatctttaacagttaacgttgctttcattgttttagccctataaactactgtcttttcaatgacttctatttgttcgtttgcaaaatcttctggttttagagcaattctctgtttagggatgctcattatatcagcttggtaccctgcaacatttggagaaagaacaggcggaaatactttagctggaatattagtatcccaaacaatatctttatcattggctttcttaacgccaaactgattgaaacgcaaagttgcagtataagcatccatgatttcagaaccgtcttcatatacataatgaattatttctttaattgtctttgctctttgataattctgagtttcagtttgtttcagcattttcagcatcccttttcctgttttctttttgaagaaatcccaaagcaaaatctaatgtttccaaattgaaatagattctatgatcataaatatatgtggggtgcattccattctgcgcaattactcttcttaatttatctacagattgctcagcttgaagtgcataatcctgtattgttgagatttgatcttttaccttttgatagccgtattccgataatcgctttactccagactgattattcttaaagacaagcattttagaaatttcttcttctatgctcttgtcgtaccagctatttttagcctttccgcaagctttgacttggggatgaaattcatgaatatatctaataatgtcatcgttagatacgttctttaagtctttttcaatatcaaatattctgactaagcctaattcataacacttacgcttccagttctggtattgataatctttaatcagctttttagccttgaggaatttcttcttagaataaaagcgattaagaccatcagcagaaacatatgatggagaaagatgattgtcatttagaattttgagaatctctttatcaggtatttcaggcaccaagtctaaaatagttttcattgagtagatcatatcatctggatcagcatgtacgttttcgttgtaagtcaacatttttattaccctgttctttatacaaattgccaagataaagccaagttcaaaaaaaagctcataaagctttatctcaagctttatgagcaattatacgatcaaatagaaatacaaaattttaacttttaaaagataaaaatgagttagaaagtacagaatataaatccaaaaataataattgcagcaaatatgcctaaacccggaccaatattatctggatctgtgttgtaatcattttgatgtaagttatacataataaaatctcctttacttgataatttattctcttaatttcaattttcaatttatattttagaaacatttctaagccaaaacgaaaaaatgacaaaaaagtccaaaaaaatctaaaaaagtttttcaatgaaatttgcccaagaagtgtctgggaaaaaactaagtctcagatcatgaaaaaagaacgttgaatttttgtttcaacgctctttttgtatacttttagctccagccttgatattattaaatcatcacaaaataaaaaaggtggaaactaacatgtacaagaattatatcacaggtcaaactgctttaacacttaatctagattttgccattccggccaatcatttggctaatgtcatcagctggtttgtagattcaattccagaagatgttttagtaggcaagactgctaaaacgggccgcccagcctatcatccagccatgatgctcaaaatactgctttttgcttactccagaagagttttttctggcagaaagattgagttgatgctggaagaaaatctgccaatgatgatcttggctgaccagcaaaagatttcatatcatactatcaataattttagatcaagcagccatgccaatgaactgattaaaaagagctttatctacttcactaacctgttagaagatgaaggcttaatcaatgaaggtgctgcttttatcgatggtactaagattgaagctgatgctaaccgctatacatttgtctggcgcaaagcggttgaaaagtatcatgaaaagctgaaaggccaggcagttgaactttatgatgaattgattactaaagaagtagtcaaagaaatggaaaaagaaaaagttcaaactagtcaggggctaaaggaattagctcaagaaactgaagcagaaattaacaagctgactaaagagattgagcaggaaaacaaagccattcctggcggttcacctcgaaaagccaagcgacgtggactaaaaaagattctgcaccggctaagaaaagattatgtgccaagaatgcaaaaatatgaagaagccgaagagatctttgccggacgcaacagttattccaaaacagatcatgacgccacctttatgcatatgaaggaagaccacatgaaaaatggtcaattaaagcctggctacaatattcaagcagtcacgaccgatcaatatgtagttgattatgccatctttcctaatccgacagatttcaaaactttggagccggttttggatcaaatgaccgtgttggacaagtttgacaaaatcgtcgccgatgctggctatggcagtgaatacaattattcgatgctggaggaaaaatatccagacaagaagtactttattccctacactatgtatgaaaaagaacagaccaaaaagtataagaatgatccaactaagctaatcaactggtactacaatgaaaaagatgattattacattgatcatcatggcgtcagattcaatttcaaatattacagccagcgcaaggatcgttctactggtcaggtccgtgattttaaggtttatgaggcagacgagttccagctaacgccagaattggaacaattggctaaaacagctagcggccgccagcgccaagttcgctataatcctaactggcaatatttaaaagaaaaagcaaaagaagttctccaaagcgaagaaggcagacacatctatggcatgagaaaatatgatgtagagccagttttcggacatttgaagaacgtatttggcatgcgcagaacgcacctgcgaggtaaagagaaggtcgaaaccgatatcggaattgcctttatgatgatgaatttgaacaaatattgtcaaagaaggtggctgaagggccgatttttattgttaaaaattttaaagagaacaaaaaaacgatcaagattcttaaaaaaggaaatcttgatcgtttttattcatctggaagctagttttttcccagacacagggatagggcttcttttgttgcttttttggttcctatttctgcgcttctccctttttcctttatacttattaatgaaaagaggtgaaaatcatggctagaaaaaacaaaatggagttctgctttgcagtccgtatgcgcatgttccccagccacaggcaggaacaggttctttggaagaaccttaacgcttcacgctttatctataatcagctcttggctaacagctataccgacagtgctattaataagttgaacaagctttatccgattcccaaaaattgttggaagtaccgcacagtcaagggcaaaaaggtagttatcgctaagtccaagaagagagcggtcggcttagaccggattactgccgacaggtatccgtggctgggcgataaagaactcgacagcatgatgttctttaatactgaactgcattaccattccgcttggcagatgttccgcaaggtacacagaagcggtgtgccaaagttcaagcgcaaggacagatcggtgcaaagctacagcacttctgctataaagcaaaaaggagctaccctttacgctaagtcttcgataaggttccttgaccatagccacctgcaactgcctaaaattggcaggatcaaggtgaagctcaccagacctttgcccgataacaatgcggtaattactacggcaacggtcaagcacttttcagacggcacttggtttgtttccttagtgctaagaagcaatcaaccgtttgttaaagaattaccgctggctaccaacccccatcgggatcgaccttaatctcaccgagtttctggtagattctaacggtaataaggttgacaatcccagatactaccgcaaaagccgtaagcacttggctagactgcaacataagctggcaatcaaatacaggcgtgccaagaaggaaaagcgtaatctgcgtgactgcaagaactatcagaagctccggcaaaaggtggcatcattacacaagcatgtgcttaatcagaggaataactttacccatgtcctctcaaccgcactggtcaagaaccacgacctcgtagttgcagagaacctgcaaggcaaaaatatgattaagaaccatgccctagcaatgagcatcagcgatgcaggctggcgtgcttttctaacccagatggagtacaaggctaagctttacggcaagacttttgtcgaaattgaccctaagtacactacccagcgctgtcacgcctgcggacagatcaagaaaggcaaagaccgtatcagattgtcgggcaataaagcccatcagaccgatcactttacctatatctgttacaacaaggactgtcccttatacatgcaaaagcaggatcgtgacgtgaatgcgtcaaagaatatattagacaagggctacagtgccctgctcggcttcgccagtcctaagacgaagattatccgataaacaataggacagggcgtttggcaactcacgtccttaacggttttggtaattgattgtaagccgtttttgggaactgcaatggctttggtatcgttgcatttgctgaaagcgcagatcgtatctaaacaagttgtgtctagtaggttaaaggcgatgaacctttagccgaagtatgcaagccccagaattaattctggggtagttgacgacaaaaaaagatcaatccgcaaaagcagattgatcttttttatctaacaataaagttctttacgtctagctttttgttgttgattcccataacagagaagttgctcaacaaatacgttagacaaaacatgaaaacatcctgcaataagtcattgtaattgacgaatgacttattctgcagatcattaaacattctaatgccttcatctttcattgtagatacggaaacataaaacttatcataaacacaatatcctaaagttctattgccactaagcaagcccaacatgaatgaatcaaagtaaaacttataattactattcgttaaggatttgcctgcctcatttttaaacttagtattcaacttatcaataagatatgctttaccaattacatcgtaatagctgaaaagaaggcacgaatatgaacgtcttttttgaaaaagaccatcaaaaatatagctatccttatcatctatcaacagaatatacattaatcctttctgacctttacccttaggaacaccaataacacatttaagcttcatcttgattttcagtttggttaaaagagattcttgctgcttttctggcaaaaagaaactttgcgataagcattcttccttctcttctgatgtatcataaaagcctgtatcaatatatttagcaagcattcttactgaacgcatgcacgtatcttttgaccagctattttcattctgcagtaaatatgccgtctttccaaacagaatatgttgagaataactgtttttctttaaatatactgccttaggcttcttgatatctccctcagtatttactggtgtttcatcaactttgggttgttcgtacttatcagtgtcaaaaaggtctatttgaacatatttaacttcaccattcataaaacataactcctttgaaaaacaaaaaagaatccaaagtcttaaaatcaagtcttaaaacaatgaattcttaatcctctataaaaataagtaatttaatgatatttcttgtgctattttgctaaaaaactgcttgtcttcttctgccctattaactaatacttcatattctgatttatcagattctttagtttgatctgcagcccaaatttctggatcaaaatcttcaacatgatctttaaatttggtagctatttgcttatacaaatattcttttcgttcattttctgaaaagttattagttacgggtgcaggaaatatatttacgtttatggtttttacaccaaacttgtttttaaatacaagacctgcgaaaacagagcctgtgccattggcaaatcctaaaaatgtaggatgtgtattatccaactcgtacttattgccaactttcttccaaatatctctaataaagcttctatctttatcagagaaacaagccagcttatctgcatgattatctggataatctggaacaatgtgttgcatgtacaaattttgagctaatgtaattagctggttctcatccttatgccaagcacgcaaaatttcggcatgattcaaatgattcttaataagaaaacctgtgtaattcacttcttgccagtcatacataccgattattctaaaaatcatactgtacaactgttttgccagataatctaaatcatcttgactactacaatgtagaaacatatcttctccgcctaaaatgacatcgactgtaagtccgctttctgcaataacagaaaattgaactttatccatgtttgcagtggaaacatctttccaatttccaacgacacccgttggaaaatagtgatcatgtagaagttgaaaatcatctacatatttattaagcaattctctattctgaaaagaaaagactccttgcttttccatagccaattcgatttcagggttttcttcattaattggctcatctgaatcaacaaaactatccttaatttttttaattcctttagaaatcagattattcaatataaaacactcctacctattaaacaaattacgtatgtgaatcaaacaaatcacataattaaaacaaaacaaaaaaagcattcgctcttttaatggaacaaacactttgaaaaacactataatttgcaaaaaccatctgcaaaattagcaacaatctaaaactataagatcaaaaaattcaattaaatcaccttacaagcccgagtttatagggcttaaaaaattttttcaattattctgacaaatttgtcatttttttgttttacctctaaaaaagtcctataattaacaatgtaagttgattaaacaaatcggtaaacgaaaaggagaaagaattatgaaaaagaatttgtttaagagttcagcagttttacttagtggagttgttttattaggtgttggtagtttagctcctactcaaaaagtagatgcagctgcaagaagttacattactgttgttaagaagtctaaggtttataaccgtaagggtcacttcactggtaaatacattcatgtcggcaaccctgaaactaaatacggtacagttacaattaagggaaagaaatactacaagatttctggcaatagatacatcagagccgttaatgcaaaatctggtaagaaagttgttttgaagcatcttgctaatgtttacgacaagaacggtaaaatcaatcacgacttcaagatggctaagggtactaagatgactgttaaatcattcattaatattaacggtcatagatattacaagattggtaagaaccaatacattaaagctaccgacttccaaattattggtaactacgctccagttatctcaaacaacaatactacttcaaacgcaagcaataatactaatgtttcaaatactaacaatagcaacactagtgcttcatcaaatatttcaagcaatggtactactgcttcaaccactcaaccagtaattaataatgggtcacaaaatcaaacaagtggcaatacacaagtacaaccaaccattccagttcaaccaactactccagcacaagaccacaataacaatgctggtactactaccaatcctaaccaaggctcacaaactaagccagtaaatccaacacaaccaactactccagcacaaactcataacaatactggtactactaccaatcctaaccaagattctcaaactaaaacagtaaatccaacacaaccaactactccagcacaaactcataacaatgctggtactactaccaaccctaaccaagattctcaaactaaacctagtggcaatgctggtgcttctgtttctggtgacacacctactactaagccaagcaagcctagccaaggctctcaaactaaacctaacaagaatactgatcaaaacacctttagattgccagctaactacagagtaggtattgattcaaatcaatgggaagctcaatcagaaaaaggtaatgctatgaacaattacaaagctaacttggctgatcaaaatcaagctgtcaacccagataaattgacttcttcacaacaacaagaacttagtgaatttgcacaaaatatctataattccgcacgttcacaattaggtttaaacaacgttgaatacaacgctaaaacacaagaattagctaaccgtattgcagataattaccgtcaagcaaattgggatgcctttgacaacttacactatgtaaaaggtatcgtagaagcacaaaagagcatgggcattaatagcaacgtaaatagtgttgaagatatttatgttgaaagtgggtctgctcaaaacatgaacgacttgaaggaacttacttataatggtattaagtcattcttctttattaacagtgaacaagaacacgctaaagacatggttgaacctagcttaaagtcaatggctgtttctatcagtactcaagacaatggttcagacattgctatgcacctaattactgtttcaagcaaatacaacttctaataagaaaaaataggacaaaaaaaggacgatttcaaaaatcgtcctttttttatgctcagaagcaaatgctaactagtctaatccagttgcatggtttctgcttacaaacaatacataactaccaacaatgcttacaaagatcacagcaataccagctgccatcccccagtcattacgactgttgccagtttgtggtaatacagtttctttatgagttggtgagttattggtaattggagctactgaaccattgccaccattattagcaacaggtgtaggaattgccttcttcttagttactgaaacagtttgagcagtatcatttaagttatcgtgtttagcaatttcttgttgaatatctgcattgcctgtggttggagcattcttttcattggtgttggtaaataattcttcaacagcaactaatgaatgtccgcttaagttcttgccattaaaggtgaacttcaagttaacagtaccatttgccttctcagctttaaatgttgcagtagcagttacaaccttaccgctttgagttaaagtcataccagtcttttgatcagctaacttcccctttacagtataagtacgccccggaattaagccttcgtatcttacgttatcagtaagagtagtatgatcagaagcttctaatactttttgaccacctttagttaaagtagtgtgaaggtcaggctttaagacgttaacagtttgagctgcagaattaatgtcttcgtgttcagctacagttgcaccagaagtttggttgccagtgtaaagcttttcaaatacgacaagtttcttaccaccgtagtttgaagcatcaaattggaatggaacttgaacactgccgttacttgaagaagccttaaatgtcattttactttgaacatcttgaccattttcttgaacaggctttccagtttccttatccattaaagtaccaacaacagtgtaggtatcgcccggaattaagccagaatattctaccttgtcattaacagtagcaatttgacccggaagcaaatctttagctccgttatcagtcgtagcggtagtagttaatgctggagtagtaaagcctacagtttctaattggtcgtttacatcttcatgtttgatagtagtatcttgaccatttgacttgccagctacatcagtaaatgcgacaaccttcttatccttgaattgtgatacatcaggaatagttaacttaacatcagtgctaccagttgtatcagttgcggtgtaagttgcgttaccagtgatttgttgaccattgctttcaattgccttgccagttgaagcgtcaactaaccaagtagtaactttgtaggtttcgcccttttccaagttattcatagcaacattttcattgagtgttactgaacctttggtttgttgaataacttgttcattagtatcagcatcagttaacttagtagctacagtaacagaagcgccttgttgtggagttggtgccttaggacttggcttagttacttctaaaatttcaccattgctagtagttacatttggcgtattagtcttagaaccaacatgacttctcttacttggaataacgtcattagtaaataatgcttgtggtgaagatggagtattgttatcttcaaagccagcatcagttggtgcagcaggaatatctacaggtgaaccagttgttacttcagtattagttggtgttggtggagtctttttaccagtaacactggcagttgccttcaagtacttcttgttaaatactgcttcaggttggttacctgccttagtagtgtaaatgtgaccactaacaatttcaccaccagtagctacagcagttaatttcttaccgttggtaggaattactgaaccgttcttgtagtacttgccgttaaccatggcacccttggcaccagttacgtgtaaagtagcattcttaccagctgagtctaatgacaacttaacagttggcttagctgctgccttagcttgagctctcttagctgcaccaatattcttttcaatatagttgtacaacttttgagcattcttgctgtgccagttgatgttcttattaatggtaccagatgctttccacatagctacgtgtgttgcagcttgtgcttcaccactggttaagcccttaatatgagctttctttgcaagttccttggtagtgttgttaccaaaaccaatacgtgcaattgcgttagcagtagcactagttgacttacctctgtggtatttttgaccagttacaggtgacaacttaggtgcgttgtaacaataacctctactcttaccaatgtgagctgaggtagtatcgctaattgccattccgtggctgtgaacagttacgtaactctttgaactgccactgtgatgtgcagtagcggtcttaccagtagatttagttaagtgtccagtaccgctcttccctttagcagatacattagcacctgcttcaaagaaaatcggcaaagccatagctaatgatgaaaaaatcttcaagctacgatgtggatttacatcgtcaaacttcttttgagccgaagttctatcagcttttctcatatgtatcgctcttttctttaacaaataaaataatatttttcatcggtttagccccgacacgtaaatattacttttgcattacaatctatatgtgtcttatttttaaataaaaaaaaggagaacgtaaattaaaaccaatgtcattaagttaagacattgacaaattatcgacttggacttttaagatcattcatttgcgatttatcgcatttgaatgctcttttttcatgccaaataaacccaaatcttgtttagaaattaggctacacgatataaataatatacagctgatttgggtttgagatttcttttgtcttttcgtcctggtctgatcggaattgtgtaatgactaatttgaataagaatctttttaaagatttcagttgaagaagaaattatatacatagcctggatgacaaaacatgactgtttgaaattgatcgcatattgatacttgcattttttttgtggtacatatgcttgagcatcaatttgactgactgcgttaaacataatcatgtgggcatagatctccatttcaataaatctatcctgcttggaatgaaactgtacgctacctaaagcatatttcaactttttgaatgaagtttcaatgccccagcgcaaatggtagatttctttgatcctttttaagggataatcggctctatttagattagttagaacaacttcccattcttctttgcctgatttaggatcattaattctaaatttacaggcacgaaattttattgtacataactctccaaagtcccagctgccatctttggtatttttagaccgatattttatatattgacggtaatgatggttaaccaaatgaacgttttctgtagccttatgggtttcataataataattagaggtagtcacccagcaagctatatccttatcacactcttgattaggcaactcagctacttccttaaatgcgccatatcccgttttagtacgtatgacataataacagttaggcaggcgattacaattttcaatcatgttaaagccggtataacctcgatccatagtaactatatatggtccgcaatttagctttttaagcatttgaacggcggctttacgttcatccatctttgacttaggctgaaagatgcagtcttgataagtattatttaacaggtcatagagtgcattaacatgaatttggcaatatggctttcctttatgattgagatttccaacgatattctctgatttaggattccagatttgattaaaatcagacccatcaatggcaaatatacgatatttatgatcaaataactggatattaaataaattctgattaaatacagttagaatatgcttaaaacatgcgggtgaaagctgacctttgcgttggacataagcggaagtactgactactttatcgttatttttaatagctttttggccaaaagctctaaacaactcactggtcaaatcttttccttgcatattaatagtagttttaatgactgtagctgcatctaaaaaccgcttcctagtgaaggcatgaggatcatcgataaaatcatgaatatgctttccagtatcattgataatttgatcaagacgatctaaaatatttctgtgaagggctttcataattaacaccagctttctggcaataattttgaaggtttaataatttaatcagagggcgaaaaggtaggttcttttcgcctttattttatgcaaaaaaaagaaccaaatcataatgattcggttctacagagattagattcaatttgtcaatgtcttaacttaatgacattggaattcagcctgacttctgttttttttagcgatgtttaattacgtgaataccataagcgattaagtaaattaccacttcgatcgttgcaataaagaaagttaccggccagttggtgataaagccgagatacagtccagcccacacgccaactaaagcgaaaaacacggaccaactgatcattgctggtattgttttaccaatatagcgcgccgttgaagatggcaatgttaatagaatgaagactagcaatgaaccaacaatctgggcaccgatagcaactgacatagccaaggctaccaagaaagcaataccaacccagccagtatgtacaccatgtgcaacggcaccgatatggtcaaatgagtcaaaattcaagcttcgagctaccaaaataattaatagtaaaactagaattgacaaaaccactagctgaatcacgccttgtttatcaacaccgatgatactaccaaacagaatattagtagcgtaacggctatttgatccagaaatggctaagaacagcacacctagcccaataaacagagctgagatcgcactaactgacgattctttttgatcgctgtgcaaggacaattctcctactccaattgaaccgagcaaggtaaatagtagcatcccccataacggtgcaatgccgataaagacggcaaaagctgctccagcaaagccgatttctgacagtgtgtgagctaaaaaagcataactccgtgctactacatatacaccgaccacgccacaggtaatcgcaatgaatgtactagctaagaaggcataacgcataaattcgtattgaaacattattcgaaatcctccttaaatttatccatctttccttgcctgatcgttcccttatttaaatatagataatcagtcatatactttttagctaaaggaatatcatgagtgacaaacaaaacggtaattttgtgttcacgattcaggtgcttgattaatcccatcaattcttccttagcagccggatctaggctagctgttgcttcatctaagatgatcatattgggatgatcaagtagagcctgcgctaaatatgcacgttgtttttgtccacctgatgcctcacccattcgggtattctgaatcttttctaaatgagtttcttctaactgatgatcaatctgttccttaacctttttggtcttaaacaatggggcgttaagtccaataaatgcacgaatcgacaatggatactccgcatcaatatttctaaactggggtacataacctaacttaacgtctgaatcaaacttaaagttgcccgcagtcggctttaacatccccattaaaatcttaattaaggtggtcttccctgttccattaggtccaagtagtgcagtcattgacccgtcttcaagctgaaaactcaaatcttgaaaaacatctttagtatcaaatctcatcgagagatcatttacttctaaaatcactcttctaccccctccctaagttgctattatttttctattttagccaaattttgataattttctttcatccaagccaagtaagtagtgtggttaggaatagtctcccgcacatttaacactggaatattattttccttagctaattttacaaataacttcacagttgaactgcttgcctgtgtattgttaacaaagaatgcaatcttttttgctttaatttcattattcatttgattaatcatcttaggactcggatcagtaccattctcaattgcttcttcaaagcccttatccccaatcttgtatcctgcttctcttaaagcataatcaaagacaggttcactaacaaagactggcttactatttttcttattagtcttcaccaattgcttaacttgattaatcttagctaaatacttgtcaccattagctttaaaataagctgcatgctttttatcaagcttagataaacgcttaactaggtaattaacatacttggttggcatacttagattgtaccaaatatgcggattatcccccttctttaatcccatcaagtcttcaccaactaagacaggctttttgctaacagaactagctagcttattcatccaagaatcatagcctaagccattagcaacaataatatttgccttggtcaattctttagcatctgccgtagttggttcaaaatcatgaggatcggtactgctattgctaatgattgccttagccgtaccatattttcctacaacatttttagcaatatctgcataaacattggtggtggtaataatcgagacttcacccgaattgctcgtcgaatttgatctattcgagcaagctgaaactaacagcgcaataacgccaattagtcccaaaaaagagattaacttcgtaattttagatttcgcattttgcataaaatatcctccttgtgcaaaataaaaaagcatttaagttagaaaattcagcataaattctaactaaaagttagaataatctagttaattacatatgtcaacatatttttgcatagacaaatagcaccagtctcccataagcctgatgctatcaataatttaagtcataaaattttgctgaattttattaaatgctttgttctaaaattacattattatataaacatatttttatataattgtcaaactaaattaaaattcttccttcacgtgctgacgcaaaacatctaagattttaatcacatgcttatcttctaagctataatagcgctcctgcctaacccgctcgctcttaactagcttagcctcttccaaaatacgcaagtgacgcgaaatagctggctgactaacatcaaactgcttaactaaattattaacactacttttttgattatcatttaaataatataagatttgaattcgaatcggatgattcaacgctctagtaatccgaataatttgctcgtccaatttcttcacccattcatactttttaatttattatagcttaaatttaggtataaaaaaacgctacccttcgggtagcgcaaaacataacagagtatcttgatttaagtagagatcatcaagatatttatattataatacgtttttgccaaaatgtattgttttttgattaataaccagaattatttaataataatattcgatattacttatagtattattcgtttgggtcttctttgacattcttcttccagaaactcatgattaaaccagcaacgattgaaccaataatagtagctaggaagtagaataagatgtggcttggaccaccgatgttaccagcaagtggtgatacccaaagaccaccgtgaggagctgggacaccaacgtgccataaaccaactaaagcaccaccaacagctgaaccaatgatacatgatggaattacacgacctgggtcagcagcagcaaatggaatagcaccttcagtaatgaatgagaagcctaatacccagttagaaacacccgcacgacgttcttctacagtgtacttgttcttgaagaatgtagtaccaattgcagtagcaaatggtggaaccataccacccaccattacagcagccatcaagatagcagcagtagctgagtgagggtcgttagcaaatgcacctgaagcgaagacataagcagccttgttgaaaggaccacccatatcgattgacatcattccggcaaggatagtggtcaaaagtaccaagttaccagtacccattccgttcaagaaatgagtaatagcaaagttaatgccactaaagattgggttaatgatgtagaacataattgctgcaataaagagcaatcctaaaattggatagaacagcattggcttcataccttcaacagaacgaggtaatttagcaaatactttcttcaaaccaaccatcaagtaaccagcaataaaaccagcagcaataccgcctaagaagccggctggtgaagttgcgtgagcttgaacgttaacttggaattgaccgttaacaatagaggccatgtaaccaccaacaaaacctggcattaaggctggcaaatcaccgattgattcagcgatataggctgccaaaactggaaccatgaaggcaaatgccaagttaccagcattgtttaaaaagatgaaagcaggagtcttagcgccacccatgtagttttctacgatgaatgagatggccattaagataccaccaccaataacgaatggaagcatgtgactaataccattcatcaagttcttgtagatacctgcccacaaacctggcttctcagttgatgaagattcagttgacttgtcttgagcacttgcacggtaaacatcagccttaccacccataatgtcatcaatcaattcgcctggcttgttaattccatcaacaacaggacggttaactaagtgcttgccgtcaaaacgtggcatatcaactttcttatcagaagcgataataacacctttagcacgcttgatttcatcaggagtcaacttatccttaaccccttctgaaccgttagtttcaattctaacttcgatgccgcgcttcttaccttccttaatcaaggcttcttgagccatgtaagtgtgggcaataccgttaatacatgcagtaacaccaacaatcaatggcttgttgtcgtcatcacttgtaccttgagccttagcagcttccttagccttcttagcttcagctgccttcttgtcttcttcgtcttttttagcttcagccttttcaaaaagatcgataacttcttcaggagtcttagtattcttcaaagcttcaactaaatcaggatcaattaacaaacctgaaagttttgctaatgcttgaaggtgagtattgtcagcaccatctggtgcagtaatcatgaagaataagtgaactggttgaccatcaagtgaattatagtcaattccttccttactcttggcgaataatacgcgtgccttgttaatagatttgttacgtgcgtgaggcatcgcaattccgccaccaataccagtagttgattcgttttcacgtgcccagattgacttaataaaagcatcttcgtcgttaacgatatcagttgctacttcaaggtcagccatttctttaatggcatcttctttgttcttagccttaagctccataatcatggagtcagggcttaaaatatccttgattctcatatttttcccctcgttttttattaagaaatttgctcaactttgatttgtgggagaacagcatcaatttggctcttaactgcaatgtccttagtaaaggcagtagcagcaccacaagccattccaattctgaagccttccttaggatcttgggtcttgtagtaagtaccaacgaagccggcaatcattgaatcacctgcaccaactgagttaacagcagtaccaacagcacccttagcatggtaaacatgatccttggtaagaaggaaaccaccttcaccagccatagaaaccatcacattttgagcacccttatctaaaagcttttgtgcgtattcaagcatcacatcacttgaatcaaaagttacgccaaacaagtctgctaattcatggtggttaggcttaattactagtggcttatatgccaaagtatcaagtaaagcttgtccagtagtatcaacaacaaattctgcacctgcttctttaatagtaggaagcaatgattgatagaaatcagttggaaggcttggagtaagagaaccgctcattactacaatgtcgcccttctttaaatcgtttaaacgatccttaaaagcagtgatttcttggtcggtaatgttaggaccagccgcgttaatttcagtttccttttcagcgtggatcttaacattcacacgagtgttatctgaaatagtaacgaaatcactttcaattctcttttgattcaattgacgaaccaattccttaccagtgaagccacctacgaagccccatgccgtattatcaacatttaattggttaaggatttgagaaacgttaattcccttaccccctgctaaaaatgaatcattgttagttctgttaacttctccgcggttaactttttctaattgaagaacatagtcaagcgctggattaacagttactgtataaatcatcctattttgcctcctctaattcaataccgactggtaatgaccgtttttgacctggttttagttgatcagttaccacaatcacgtcacttgtattggcaaacacagcaaagttacgctcaccgattttactattatcagttaatacataagcgtgtcttgcctgtttgatttcggctgccttaaccgcagcttcctctggatcaggtgtagttagattgccatttttttcaattccattagcaccaacgaagctagctgaaaaattcattgccttaatctgacttaaggcggtctgacctataacagcatgcgtatcgtccttaacttcaccgccaattagaattgtgttaattccgtgatttaaactgcataaagcagtctctacaccattagtaataatcttgacgttagcaacctctgctaaaaatggtaccatctcataagttgttgttcctgcatcaatgaagacattgtcacctggacgaacaaaattctgcacggcatatctagcaatagtgatttttgcgtcatgattcaaactgaagcgaacgttttgtgatacatcacgagaaaaatgtttaactgattgggcaccgccatgaacacgcttaaggatcccatttttttccatctgaattagatctcgacggatagttgattcagatgttgcggttaagtcacataattcacttacgcgacataactcgtgttgattaacatagtcttcgattaagctttggcgctcctgagtcagcatcatttctcacctcgataaatattgtattcgctttctcctccaaaatcaatcatttttcttcaaaaaatgtcatttttatttattatcgttcaataacattcatttatatgcaaaaaagatgccgttttttgattgaaacgacatcttttcttcgtcatttggaattattcttagtcgttttaccctatttgactaagaatccgtaaagatgactaagaaagagaaccaaagatctattaaccttgcaaaatagagtagagggagttttataactcgcccctctcattgcaccggacgtacggttccgtatccggcgctacgtttgtgattatttacgagataaataatattctagcggatcgaccaagcctgggcgatccgctttgcttatgcccaatacttttgggctaagcagaaagttaatgacatgacccgtacttcttttataccaacctaagcgcgtattagctactttatgaatatcttcatcactaaaattgcactttagtgccttgttaatccgcattaagttaatgtatattcgttttggtagtttccattgtttaatgattaccacccgtactttatgacgcagccattgactgaacttaattagaaaatatttcatgtcgccaactctaaagtaattgacccagcctctaactacttgatttatcttagtaaagactagtgatagaggctgagcagctgcttttctgcgacagagaagttctctcatcttgtcataaagcttgattttgcggtcatctcctggctttgcttgccagtattcgccacttttccagaaggtaaagccaagaaagttgctcttggttggtcgtacaactttggttttggttgcgttgacctttaggaatagctttctttctagccatgatgaaattgaattcatcacacgtttggctgatttaccgcttttgacaaagatattgcagtcatcggcatagcggacaaagcgcaggcctctttgttccaattctttatccattttatctaaatagatattggatagaattggtgaaagagggccgccttgtggtacacctagtttattaggcttaacccaaccatcttccattactccagctttaagaaaggctcgaattaaatggagggtggttttgtcatttacttgctctctaattattgaaattaatttatcatgatttaccgtgtcaaagtatttctcaatatccaggtcaacaacccattgatagccttcgtttaaatattccaagacttgttcaatagcgtcatgagcactgcgtccaggtctaaagccatagctatgctcactaaaatgaggatcatagatcttcattaatacttgggcaatagcctgctggattactcggtcaacaaccgtgggtattcctaaaggacgtttcttaccattagctttaggaatgtagactctgcgaacagcttgcggacgatacttcatcttcatgatggcgtcctttatttctacttgatgctttttaaaatagctatcaagctcatcaactgttctcctgtctacaccaggcgctcccttattgattttgactctcctgattgcttccttgagattattttgacttaaaatctgttcaattagttccatctcgtgatatctccatttctacttgtaaatttattcagaattgtcccaattgctttcaccatcaaagagttacgttctctttgtgctaggctatcctcttatccggactgtctgaacattgcttatagcgagatatgctcttacaaacattaggcccttcgctccagtttcattacaaaaccttcagcactactacgacctcagctgacttctcgcgattaacctttttcgaccaggcttacgatcgctgatattaaagcttactcggtttcacctgtccacgagatctctcggggtaagacattcatctttaattttccactgccccctggtttaccgtcttggttttacggttgtcctttggactttaacttgtgctgcagtctcatccaccatttggcctgaccaggtttctgtacgtaggctcggaaaactcgctagccacttccttcacccatagcgtcaccgctaacggcttgtggttcgctacacttggcgacaactacccgtgatctagactttcactagactagacaaatgccatgcccgacacacagcaaaacacgctgaatcattattgattcagcgcgttttactattaaatatattttgtctagcctctcaagctacgcttaaagttttgccatgggccgacatcatctgtttgcaaaatcaagtttggatagatttttctaatccagataaatgacgctactgtagcggctaaagcaattaaagcagagatagctgcctctaaattagttgcgttacccataattactctagctggcattacaaatgatgatagaaacgggatgtacgataatactttagcaaaaatcgtatccccacctgattgcatattgactgtgaacaagaacccgatcaacatcaatgtagatagtggtcccaccgctttgttggcattctcgcttttagcaaccaaagcgccacagaaagctgcaaagataataaacaataccaagccgattatcgtaaacaccaatccccaagaagccagattgccaattgcttgatcaatcatcggcttatactgtctaaataaatcgctaaagccatcgatgtatggggccgcgcaataaactgccacaaaaccaacaacataaattaacacttgggtgataatttcaccaaaaatacctaaaatcttcccagtgaaataatcgccacctggcatactcgaaaagattacttccattatcttggtacccttctccgtagcgatatcttgtgctgttacttgcgtataagtgatcacaagcatgtacaagataatcagcaaaacccagaaggaaatttgcttaacaggatcattatcaaagctcttcttatcaacatgcttaacttgttgcttaaattgcgctcgcgtagctaaagactgagtctgttttgtcgttagcttggccttacttaaattcaattgttgctgggcggtgtttaggctagttagcagctctgattttagatcactgtccattttttcatcactatagtaagttgcagctaattgattattcttttgttcaattaaaacatagccatcgatatcttcatctttatacgcctttttagccttagcttcagtgctatagttgtcaaagtcttctgactttttaattgcttgctttaaggcagaattagaagtaactaccccgacatagttgtcatcactgccgccagctgataccattccgataacaaatgaaaagaagacgagcagaaacggtgctaaaatcatcagcaaatatgaccaagttttcacttctctacggtaggtttcttttgcgacaagccagatcttattcatgacgcgcacctgctttcattttgaaaatctcgtctaaagttggaggttcctggtcaaaagtctggatatattgaccggccgaaagttggttaaaaatatccttaccatatttttcgtctgcaagaataagcagcttcattccattgttttgcaaaattatatcttttacacctggtaaggctgataattcagtagcacttttgtctgtcctgacaaaaattcgagttaggccaaagctgttcttaatttcatttactgggccattcaagacgatatgcccatcattgatcattacgacgtcatcgcacaattcttccacgttacgcatatcatgatcagaaaaaatgatcgtagcgccttttcttttttcttccaaaatcagctgcttcattagatcaacattaacaggatctagtccactgaatggttcatctaaaataatcaatttaggttgatgaattaaagttgcaatcatctgtactttttgttggttacctttagacaaagacttaatcttatccatggggatccctttaacagccaaacgtgataaccaatcaggcaattcttcttttacctttttagccggcatccctttaaggctagccaaaaacactacctgatctgaaatagttaacttaggcatcaaacttcgctcttcaggcagatagccaatattgtcataatctttagcgttgaaagaatgtccatcaatactaatctggccgtcataatcaacgaatttcaaaatactatgaaagatcgtcgacttacccgacccatttttaccaaccagtccaagaatacgcccatctgacacactgaagctaacatcaaacaaaacctgtgttgacccgaagcttttatttaggtgttctatttttaacataatttttcctcaactttttatctaatggttattagacctagaagtacaccgtcaaagaactgccataaagtatcggttgaaaaaattgtttttacaatatcaactgacccccaattggttactaaagtaatcactacaccagctgaagcaaccactactcctgtaccaataacttgaggggcaagtttcaacactttcttctgccatggaatctttgatgcgaccgttttattaaggactaagcttgcggacatgatgccaccaaacattagaccgaaagccaatccggctccaatcgacataataatttgaaaaggttgaggcgaaccagcagtcttaacatacatcatcacaagagctaatattggtccaacaagtgctccaattcccatgccttcaataattcgtttgttttcacgagcaaatttttcattattcattgttcttacctcaaggaaattttcagctaattaaacaaatccgaaaacttagtcggaatgttgttcttggcgaagtatttcttgaatgcatccccaaaactcaattgatctttttctctattttcaagcaaatcatgaacagctaagaatgctgtaacggcgtaattaacggctaaaatgattaacaaaccgagcacaatataaattaagtacagcattgttctttcctccaattcagcgattatctcccaggaaataatcttttatccttttaaattaatcatatccccatcatttatgtaaaaggtaaaaccgtccaattctgtcatttttcggactgattttgcattttattcttcatcttttttataaactaataaatcccctggttgacaatccaagacttcacagatcttgctcaacgtgtcgaagcgaacgccatgcgcctttcctgtcttcagaatcgacaggttagccggcgttataccaactttctctgccaactcctttgaagacatctttcgcttcaagagcataaaatctagtgtcacttcaatcatctatatcaacctttctaaataatcgagtctgcatcctcctgaaccttcattccgtacttgaataccaagtagactacgtatagtactgctaggaaaagcaaaccagttgtcacaccacttgggtatagtacattattcgaggatttagcgaaccaagtgcggtgagttatgaaaataatgtaatctattattgaaataagggtatatccagcaactgaaattaataatttcttgagtaaattcaaattactatcagcaaagtaaacttcttgcttgatattcttaacaattaatctggcatatcgacagattaaaaaggctgcaacgctcatcatgatcagtgatagcaacacaaccactattgcaccgatatagttatcaactgatacgccttttatacccctaccactttcaaagccagcacgaaaatccggattatgtataccaaataacacaacacctcccataacgatccacataattattcctatcacacaaaatatttggtaaatccaagcaaaaatcgtaagcaaattcaaaattaattttttcatttttctatcctctcaaaatatggatgattctgtatatagcactgccaattacacccgttactccaattactaataatgtaattctaagaacactccatgttccgcctaagttagcaaacactaagattgccatcattatcagcattccaataattgaacctatctgtcttttcttttctggaagcatatctatccctctcttccataaaactatctatctctttctcgtcttttataattattgtattacgataatttataattgcaatacagaaataaaatatttttttgagataataaaaaaataccaaattagtcgttaaactaacttggtattatgttttatcttccaagctactgctttttacttttcttcttatagtaagagttcatgaaaatattcataaagataacaaaggctacactttcaactatattccaaaatactgttccaaagcttaatgttttgtactgaaaatagtcccataccaatcctattaacagggccaaaataccagcgatgatacttctgtttctaacttggcgctcggttaaaattttatttttcataatttttaccccattattatcatatcgaaaaataggaaatctattaaccgaattttctattttttaatattatctatgtttatgttttttatgtctattttgtttggcgaaatctttaacagcgccttctacacatccttttatcataccacttccgctagggagcgcatcaatgaaacccgataaacatgatccacctacaccaagccagttagtgccaccacttactttttctaattctttataattcatttctttcatcataaaagttacctccttttttacaaatgtgatacacaagaaactgatccgctaataatacccacattagcaccaaatatagctccacctactgtaccaattggagtaccaaatgcagtgcctgcaatgccatattttagtccatccttcaacgctcccattccaatagctttagcacaatttgtgatttttctacggcgtcttgctttaccaccgttaccaccgaaaacagctgacagttcttcataagttaaagtttcaaatttgttcatgtttttcccctttataaaacttctaattacaattttcataagtgaattaagttttacctctcttcaacttacacactaataatacaaaacaatttaccttcattggcgtataataccgatttagcacgaaacaagatctatttggaaaatatttaccaaatcggccaagttttcgtatattagtaatttacaaaggattcttattaattgttacgctaacttgatattctgttttataaatccgaaaactagtaaaaacatagacacaatgcacttattatgagaatggctaacaaaaaaatcttctcatagccaaggctacaagaagattgccatcacattaatgcataaactgatacgcacgctctttactttaataaaacatgatcaattatacgactataacatagccactcaaaaccaaaaacttgagtcgaaatcaaataatcatttttagcatagtaacctacgaaaaaaatcacaagtttcataggtttctttgcgttatcttctaagtattacgatattttctattggagatatttttagcctattcgcaccagtatttttttcaatacttatctactagttattatctacctctatgaaaagaactttggaaaaacttaggattttccaaataaacgtctcgtttatgattaccacctttcttactgtataaaggtagcatgtgttcagtatcagttagaccaatatcatctacagaacctgacccacctaaaattccgcttaaaagtacttcatctttagaaataatgattcgtttcatctacttttcctccttagttttctttcctaatgaaatgcccaaaactaaactgattaagatactaatcattccaattaattgaccccagatattatccttctcacctgtagatggtaaagactgagtagaaccatttttaatagtgtcattttccaatcgctttaacttagtaattctattttgattgttcttaacggcactataaggcttgctttgcacttttactgaatcaaattgtttattttctttcacacttccgtgtttttcactaactgctgctagaataatattctttttatgcgatttagctgttttcttgaccttagtggctacgattttaggttttactggcttcttcacagttttcttcttagtttcagctctaggagccgcatactcttgattacctgtcgtaactttagtcagatctgcagtagagctagcaacatttgcagcattctcaaatacgctattttcaacaaagtcagtaatagcaacgtcattgctagactgtgtttgatcatcttcagctacagtcacttcaggtatttcattactttcagattcagtagtattatcatccttcggttgatccttaattactgcctgttccactaatttattagctgcatcagaatacaaaaagttatataactcttgtcccgtcttttctccaccgacccatgcactaataatttttccattaataaatctcattgtagttggagtacctggaataccaatttctttgaaggcatactcatgtgctccttcttcagcatcaatattgaaataaagcagcttacctttaacgatttcattgaaatcttttaaatcaggtgaaaattgtcgacagtagtaacatgttggacgaccgatatacataagatgttcttgattatttttctctgctagaagatcttttacttcttgcatttttactctatgaaaatcttttacattgttctcataatcttcaacagatacctcatcttcatcatcttcactatcttcctcatttgcattattaggatcttgattattagtattctgtgactgattattttgatcttcagaagctgctggctcttcttcctgcttattttgagtttgagctgcttcgttcttactactagttttctgctcagattcggaaacatttttatcatcattttctgttttagatactacttcacttttattctcttgagaagtattaccttcatccgcatgcacaatagtactattcatcatcaataatactgctgggctcaacattaacattaatatttttttcttattcatagatcttcctccgtattttttataactaagaaaaatatatcaattatcagctatctttttggttatcagacttattcagtacactttttgaccaaatcagttatcaaaataattggaatttgattctaactaaaaaagagcttttcagctccttttaattttggttaagaattttatccttaaaatattcaaaatatgtactcttacctgtaataatagttgcgttgccttccatcccatatttcaaatttttcttggacttggccttacagattacttcatagacattatttccgcgtagattaatgggatatactccaatttctttcacttttcctactaatctatccattgttccactagcattagctacctgaaaatacagtgtttggcctttttttattgccccaattttattacctgggaaataagtaactacattgaccgttcttttagccttaatcatcggaaacaagtgaactgtattctcctgtttatcatcaagatgaactagccatttttctctatttcttctaacaatttgtccttcatgatagtttctattggcaatattaagtgtattttgtggttctacaattccggtagatgtaactgtactttgtctagttgcaaagaaagaaccgactattaagatcagaactaaaattgccataggaataataatcatagttgaaaaattcttgaatttataggaatagtattcggtactctcatagtctttattattcataacgttgctcctaattctcaactaagttatagtaaaagccatgtttctgcattaatttctcatgacttccttgctcaacaatttgaccatgatctacaaccacaatattgttagtcctttgtgcaattgctaaacgatgagcaataaaaataatcgttttatcttttaatttcattaaattatctactacttttttctctgtaatcgtatcaagcccgctagtggcttcatcaaaaattaaaattttagccggtgacaataatgcacgtgcaatagttagcctttgcttttgcccaccggataaaatcttggcattttcatccatcttggtttcaaactgcagtggtaattgttcgatttcagactcaatttctgctatctgacaggctttcaatatatctttttctgtaatatctggtcgactacctaagagcagattttctttgattgttcctgagaagatgtatggtgtttggggaacatagtttacgtatgaccgtaagacatgcttatctactttagtagaattaaatccattaaaagttaacttgcctttgcttggagagaagaaatcaactaaaagtttgaccatagtagacttacctgagccactcatccctacgattgccaacttatcattgggttcgatttttaaattaatactgaaaattgaaagcaccaaaatcaagctcaagtcctgtcactattgagctttcttagacgtaattagtttttatatgatctgtttcagtgcaatttgtatgaatcgtggcagttggttaataaagtcattgattacttcatctatcttttcaaaactattctgtttaagctcttttaattctgaaattaagtagaccaatgcatctacgaatctaatatcaggtaaggattcgttcattagatagaataaatctccgattgtcttatcatctgtattttgtctttcctgccaggtcaatagatcataagttattgctgtaactgcgatatagccacattggccatcatagctttgaacttgagatttatctaaagcaagatattgcttagacgtcttaaaatatgtttcaatttgccatctacgaccataaagttggatgatttcttcagggctaagctttgtctgagtagtagctaaaaccaaatacttgttcttgtttccacggttggagacaaagacgagctttaataaaaagctatgtccatgatattgagcctcaactatgcttgaataaagataatgtttctttttacggatgtttgaagcagccaaacgatcatacaagtctttaacgctatagcggcgatggcgataaatgtaataaatctttgaactcttcttgatcatgccaagtccatctaaaccgatcttctttaaaatccaaaacattcttggagaagaaaaccaagaatcgaataagacgtatttagcttctactcctaatcgtaaggcttgtctaatcaactctacagttacatcattcatctttctctgagcttgatttctccttttaccagaaattgaacgttcatcagcagtaatgggagcagctccaatcatatttttcttggttttggttgacatcaaggcaaagttaaccggcaagaaggtattgccatcgctccagcctaaagttaaaccacgatatccgttcaaatactcatgcttgtcatggtcatagactttagctagcaattcggtctttttagaaaaagaccgagccatcagcgtatcgtcaacgataaaagcaagtcggcgtcttttatcgataaatggttttaagcagccaatgagccgggctgcaatcaagcataatagtttttgccagttgattcttccatcgttaagtacattgcgagcagttctaacggaaaaacgtttgtcatccttagctctgaataaagaaagccgagcaaaatgtactgacatcagccaagagataatcatggttaatgaaacggtggatttacgcttaaaattgacttgtttagttaacttagctagaccaattagattaataaatgaagaaattaaggatttagtatcattttctgtgtcgatttgttctatactgttcattgcgcaggatctcctttactttttaggtcgacacttaaagtataacgcagagagagcctgcgtttttatttttgataagaaaaagccaagaggcgcggggaaggagcgttaatcttagctttcaagtttcagattaatatctttcccggatttaaaattgaagtgcaacactaagtgttaaacaaaaaggccatgaagacctaaacttgaagtgacgaaaaatcaagaaaggaagatcttcatgaccaattcaaattctagcatttctaagcactatcatcaattaaccagcgtacaacgtggacaaattcaagcaatgctggattccggcataacttcccgtactgttatcgctcaagaagttggctgccataagtcgacaatcagtcgcgaaatcaaacgcggaagcgtcctgcaaagagacagcagctatttattgtatgagcactattacgctgatactgcacagatttattatgagaagcgtcgcaaaaactgctatcagcgcaatccattgaagcattatgctgtctttttgagaatgctctccagacgctttaaagctaaatttgatgccaccagcatcgatgagttcgttggtgaattcaaaaggactatgccaggctacccttgtcccagcacaccaaccgtctatcgctatattgatcagggcttgctggacataagcaatattgatctgcctatgaagctcaaaagacgcaggaacaagcgtcatcacagccatggcggtcacgctttgcacaagaagcatcttggcaattccattgaacagcgtcctaaagagattgaagacagaaaagctccgctgcactgggaaggagatctggttaaaggcgtcagacgcaagaatcagcctgctttaatgactttgactgaaagaaccacacgctttgaagtagttatcaagattcctgactatcgggcaagcacatgccaaaggctgcttcaaaaggagattgacagacatcctgcctggtttaaatcaatcacgtttgacaatggctctgagtttgcggatatgaccaagatcaagggctgccagatttactttgctcacccatattctccatgggaaaggggcaccaatgagaactgcaatggtcttttgcgtcaattcttccctaagggcaagagcatgaaagacaagtcaaaagcttatgttcaacaggcaactgatgccattaaccacaaatatcgccgaatcctccaatatcacacagcagaggaactcttcaagcaatatatctcttcataacctaactgttgcacttaatttgacaattcaggaattaatatcttttaatacatcgactccatagccataatgatagtcaacatgatgatattcaatctcacctgctaattgcttggcatccctaatctgagcatctttctggaactcactcttaaccatgtatacttcattcaatcgattttgtgctacattagctgattgtagagttggttgaagattaataatgctctgaagtggatctacaaaatacgatagtaatgcgttgaaggtcattaattgaccaatgctcatctgcccgttcattacaaccttagcccctacccagaggataattacattgagagataactgaatgaaggtctttaaagctgactgcaaagattcagttttactgtaacgaaaagatttcttgaggtaatcgacgaattgactatcaatcttacgataacgtgtttgttcgctatttaaagctttgattgtttcaattccttgaatatcttcaattactgaagaacttaagacagcattactctccatctgatcattattcatcttttcaaatttcttagaaaagctaagaatcaccactgcataaattggcaaagacagtagagtaatcacaaatagagtggaattttgaattgccaaaactattcccatcacaattacaattgaaagatcaagaaataatgaaataactgtactggcgagtgcgtcaataattcgactagcatcagagaaccttgaggtaatttcccctgttctacgagttacgaagaattccattggtaattcaaaaatatggcgaatgtattgtaagttaagatcaatacttaatcgctgacctagaacatccaatagaaaattttgcccgtaagaaaagatagagttgaaaacatatgctatcaataaaccaatagctaggatcgacaaagtttggtatgtaccgctaggaatataagtatcaattaagccttgcaagaagtatgagctacaaatactaatgattgtcatcaaaagagcagccaaaataatattagtgactagtttcttttgtttgaacatgtatggaaatagtgaccacagattttgctttttctctttgagtggctcaaaatcatcatttgggaccataaaaagggcaattcccgtccattcttgagaaaacttttctttagacattttcgttaaaccaacgctaggatccggatcagcaatcactaaataatttttggttgccttaatcacaacataatagtggagtaattcgccttgctttaagacgtgtacgatgaaaggatattgaatgtctgcatcaggatcaaacaaggacatgtcagctttaactgcttcagtttttagattaaatgcttgtgctgttttaactaagcccagagcggtagtcccttctaaattagtgcgggctgaatgacgtaaatgggctaaaaatactctagaatgatattttttaagaatcatagctaagcatgcaactccacaatctgattcgtctacttgtggtacataaattgatttatactgtagtaacatcttttccactcctcatattaagttgaatccattatttcatgattggaaaactaaatgtaaaaaaataccaaatcggttattctcattaccgattcggtattttagttttctaactagattgagctactcaactttaatattttcaaatttatctacaagctttttaaccacggctttatacgatctagaataagttaccatctgaccattatcaaatataataatgcgttccttcgtgtcaattgcactaatgttcttaggatttaccaaagaagattgcgaaacttttgccaagaatgggttttctttatcaatctgagtaatatttgccttatactcaacttctccattctcagtaaccatatgtactttatgctgtgtagtactgtgttcaatgaaaagtatatcgccttcggccactttacatacgcgccgaccaatcttataagtaaagtcacgttgactaaacttaattctgttagataaattatcgaaggcgttacgtaacgtttcttcgatacgttgaataatcttatcagacgacatagacttactaatataatcaattgcaccgatacgacggcgatacgttaatggagcgtacttatcgtacgccgttacgaagatgatctgggcattttcgtcattcttcttgatgaattcagctaaatctacgccattcttagctttagactctcgacttaattcaatatctaagaagtagataccattcttaatatcatttgtgactatgtatcctaccgcttgagcaaaatcgttagcaacaaacgtaacagattcatttaattcagcgtaaccttcattatcatctattaagtcttgaatagatgcattgatattcttagcaatctgattagctaaatctttatcgtcatcgcatacaatgattgggaacttactcatcctcttcaccatcttccgtatcaattgtcatataaaagtcgaaccagccgtcttgaattgtataagaaatagacatatcaggatatttactctcaatttccttaatattagctaatccaagccctttatggtctttcttagtagtaaagccacgttgttgaatttgactagttgagatatttttattttggattttatttctgatttcgaactcaaattcatctgggtcatcagaatagaccattatttggacttcagcacttcgaatatcatgcttttcggcaatcaatgctttactttcctcaattgcattatcgaaagtaatgccaataatacgtactagatcgagttcatctacatggtctggtaaattacggatattatttcgacattcaaaattatatggtatatccaaattatacaattctgttatctttggaataataatgctcttaattgatttaacgtaaatgtgatttaggtctttatatttaagtaaggctttagaatttaggttagtttcagtatatttatctagtttctgaattacttcttgaacgttaccttcttgcgcacttacctttaaagaattaagaatatttttgtaatcatgtctgaaggcgcgaagatcatcttcacttttttcaagataagaagcatattcttcaagctgatgctgctgttgctttaatttttcttgatcctttttatttaaaagtttttcttgtaccatcgtcatttcatgatatataaatatagcaaaaatagtttggataagaatatagagagaaaagaacaaagttaatggtgtaaaagatttgctttgaatatatatgatagagatgctcaccgtagaaacataggtataagctaatatgcctacgaaaattttattattttggtttgctagataattatatatttttccattacctagttttattgcaactatcatcattagtattagtaagaaacgtagtgataattggcctatcaaagtaaatgacataacctgagtgatcatatcagacacaatatcaactaataaatctaatgtgcatactaatattattgaaccaaatagtatttctaatgtattattttttctcaaatataatacaaaaagcaagtgtctgggaaaaaactaagtctcagatcatgaaaaaagaacgttgaatttttgtttcaacgctctttttgtatacttttagctccagccttgatattattaaatcatcacaaaataaaaaaggtggaaactaacatgtacaagaattatatcacaggtcaaactgctttaacacttaatctagattttgccattccggccaatcatttggctaatgtcatcagctggtttgtagattcaattccagaagatgttttagtaggcaagactgctaaaacgggccgcccagcctatcatccagccatgatgctcaaaatactgctttttgcttactccagaagagttttttctggcagaaagattgagttgatgctggaagaaaatctgccaatgatgatcttggctgaccagcaaaagatttcatatcatactatcaataattttagatcaagcagccatgccaatgaactgattaaaaagagctttatctacttcactaacctgttagaagatgaaggcttaatcaatgaaggtgctgcttttatcgatggtactaagattgaagctgatgctaaccgctatacatttgtctggcgcaaagcggttgaaaagtatcatgaaaagctgaaaggccaggcagttgaactttatgatgaattgattactaaagaagtagtcaaagaaatggaaaaagaaaaagttcaaactagtcaggggctaaaggaattagctcaagaaactgaagcagaaattaacaagctgactaaagagattgagcaggaaaacaaagccattcctggcggttcacctcgaaaagccaagcgacgtggactaaaaaagattctgcaccggctaagaaaagattatgtgccaagaatgcaaaaatatgaagaagccgaagagatctttgccggacgcaacagttattccaaaacagatcatgacgccacctttatgcatatgaaggaagaccacatgaaaaatggtcaattaaagcctggctacaatattcaagcagtcacgaccgatcaatatgtagttgattatgccatctttcctaatccgacagatttcaaaactttggagccggttttggatcaaatgaccgtgttggacaagtttgacaaaatcgtcgccgatgctggctatggcagtgaatacaattattcgatgctggaggaaaaatatccagacaagaagtactttattccctacactatgtatgaaaaagaacagaccagaaagtataagaatgatccaactaagctaatcaactggtactacaatgaaaaagatgattattacattgatcatcatggcgtcagattcaatttcaaatattacagccagcgtaaggatcgttctactggtcaggtccgtgattttaaggtttatgaggcagacgagttccagctaacgccagaattggaacaattggctaaaacagctagcggccgccagcgccaagttcgctataatcctaactggcaatatttaaaagaaaaagcaaaagaagttctccaaagcgaagaaggcagacacatctatggcatgagaaaatatgatgtagagccagttttcggacatttgaagaacgtatttggcatgcgcagaacgcacctgcgaggtaaagagaaggtcgaaaccgatatcggaattgcctttatgatgatgaatttgaacaaatattgtcaaagaaggtggctgaagggccgatttttattgttaaaaattttaaagagaacaaaaaaacgatcaagattcttaaaaaaggaaatcttgatcgtttttattcatctggaagctatttttttcccagacacgtcaaatcttttgtgtaaatagttctttctcgtaaattgattttttaattatttatttaatcaaagtaggattctaaggtgtcctgaacctgaccaaagcctttatgaattcgattgaaataacggtcattgtagctcattgcctgaataccaataaaagcatcaagcgactgttcagttggaaactctgccttaggcttagctttgcgcttgatcacattgttaaatgattcaatcatgttagtcgaataaattgaagctctgatctgcttgggatagttataaaagaccagcagatctggttctatgtctttcaagcttctgataacatggctgtaaaccttgccccatttggtatagaagtcatgcaggacagctgtggcttcttctttgtttgtctgttgatgcacctgtttgaattcgttcatgatcttttcacgatcgtcgacgcgtactttagcgcagatattgcgcatgacatgaaccaaacagcgttgaaaatgagctttaggataagtcctggccaaggctgttttcatgccaacaacaccatcagaaagaaagagttcaacttgcttcaagcctctggacttcatgttttgaagcatctctgtccagacttcaatgttctcactaggagcaatgcagtagtcaatgacttccttatgtccattaggtttaatgccaatggcaatatagactgcttcacgctcaaacgtttctcggcgcaaaggaaggtatgtcgcatccaaatagacgcagaaaaacttgtcgcttagcttgcgtttgtggtaagcctcaacctttggaatcatctgcttggaaatatttgatacctgagctggactgtaatggctgccatacatcttttcaattagatcggctatttccctggtggtcacgcccttggagtaaagcttgataatcatgctttccaagatatccgagtgctgcttgtagtcaggcagcgtgtgctgatgaaattgaccgttgcgatcccgaggcacttgcacttcaattgggccaaattgcgtatcaactttgcggaaataagcaccatttctagagttgccagtattccagccatttctggcatagggatcatagcccagaaaggcagtcaattcagcttctagcaagttattaacagcctgttgtagttctttgcgcaataaatcatttattttgtctggattgaatagagcttgagcaaaatctttggtaaaatcattcatgaaggagttcttctttctgtatgtgttttttttgttcaaaccaatcatacgagaaaggaactcctttttctaatgtttaaagaaataaatttaaggaatcattcatccttacacaaactattttacagtctcaaagtttcaagtatatttgtgaagattacgccaatattacctatagacaataacaaccctaaaaaaatattagcaatacacaaaaatagaatctgtctctttttagatcttactcttgatatttaaaaaaaacaccatacatctgctaaactagaaaaaacattaagaaaaagaaataagactatcttttccatatattattccaaagttttttactcaagaaattaaaaccaacatgtgccgtgcttccaccaacaaccttagtcaattcttcttccttcaaaacagtctttttaacattttgcttcttcatgatatttcatcctttcatgattttatactcaacttgtttacacctttaatatatcatgtacttttaagtaaattaaaaaagataccaattcagtcatactttcgtaccgatccggtttcatatttcttcaaacgtaaacaactgacaattaattttcttagctaattcctgacagctatccgtaaagccagatttggaaaatagataataatgcttaagtggatacttgaagatttcactatttgtaatcaatttttctaacacactacgagagatcggttcattcttccatttacattcgccgaaatatccatcacgttcatcgtcagagaatcctacaatatctaactcaacttgttgatgtgttctcttatcggttccccaccaattgcccaagtggataaacggattaggaacaattttttcattcatatcctgagaccacatgaagtcttgactgtatttttcaaactcaggtcccatgaaatcagatagacccttttgtacttttacccaagcaagatcagttaagccacgctcaattagatcggtttgcttgccaacaaaggtataccagaagcggaacatcccgtcacagatacgataaacgatatttttgcttttactcttcttttgctcagtaaccggtaactttttctcaacaatacctaaatctatcaaattattcaggtacgtggttagcggaccagtttgtaagtgggcggattgcgcaattttactatgcttagaagcacctgaagctatcgcattgataatcgaattatagttagttggatcgcgtaattcctgttgtaacaagttattaggctcatcaaataagcgacctgatttactcaaaaagtttttcttaatattatccgcaactgacatgctgtctgacatataactcaaatattggggtacaccgccacaaaccgtattgatgataaaagcgtcctctttactgagttttggtaacatttcatgtgcttctgataatttaaatggttcaagctttaaggctaaagtgcgacgaccatatagtggactttggtagcctaagacttgtcgttccataaatgacatcgatgaaccacataaaatcaaaaataggttagtttctttgaattcatgatcaatgtaggattgcaacattgaactaattgtagggtaagccttagccaaataaggaaattcgtcaataactaaaattacacgttgtttttgagctaggtgtgtaatttctttaaagcattcctcaaaatttgcaaatttttcttttccaccctgatctgtatttttaaaaatactaattgcatcagaaaaacgttttagattatcttccgcattttcttcaagtgctacataataaattgactttttatcttttaaaaactcattgatcagtgaagtctttccaattcttcttcgaccatagatcactgtaaattgaaaatcattttcttgatacgcctgattcaattgctctaattcttgatgtctacctacaaacatagcgcactccttttcactacatcgtaatatactacattatattatactataacacgatatagtataacgtaatgtacgtgtattctatttttgtaataaaaatggccgttacttagagaaatagcgaagatcattaaattttaacatgctataataacaatagaacaagaataaaaagttttagcgtgcgcgttgaggtagctcctcaacttagtcattaacgtgtggctctgctttggcaaagcttttttgttatgttaataccctacaaaaaagaccgtgcatccctgcacggtcttttcatcttatcacatctattttctaacgtattcgccgttcttgtacttaaattcaatcttcttgttaggcaattgaaccgtaattctgcgatatacaggaccgaagccgtgcttttcaagcttaactttcacgctaccgtccttgtttaccttaaccttgtacaagttgtattcgcccttttggtacttaaagtcagttccgttatcttgatagtgaacgtacttaccctttttaccaaatagtctaaaggtcatactctcgtctggttcaccagagatgtggctaacttctttaccccatggcaagatagtgttcttcttgataaacagtggcaacttgccaattggtgcatcaaccaaaatcgtggtctttccagcatgttcaacaccattccagaaatcaatccattttccttttggcaaatatacggcacgcttggtttgaccttcttgaacaactggggctgccaaaatgtcctcgcctaccatatattcatcattcaagttatacacctgtggatcattttcataattaaggacaagtggacgcataattggcaaacctgtcttagtttcacgatagaattcatcgtaaagatatggaatgaaacggtaacgcagcttcaagtacttacggtaaattgacaaggttggttcgccaaatatccatggttcttgtgagcgagttcctagagccgcatggtttctgtacaatggactaaacaatgcgccttcgatccaacgagtcaacaattcaggtgttgtgtcagcaccaaagccaccgatatcagtaccggcaaagctgaatccactcatacctaagttacataattgtggaatcatcatttggacatgtgtccataaactttggttgtcaccagtccaaactgtggaaaacttttgcgttcctgcatatgctgcacgcgtaatgacaaatgggcgttttccactgaatttcttcaaaccttcataagttgccttagccatgttatgaccatagacattgtgcatcttcttatgagttgaagcttcttcttcattatggaagacgatattttgtggaatttcacccttgaaggatgcaggttcattcatatcgtcccagatacctgaaacaccaaggtcaactaagtacttgcagttcttagcccaccacttacgtacttctttgcggccaaagtctgggaagactgaatcgccaggccaaacttggtttacataaacagtgccatctggagcctttacgaagtagcccttttcgataccttccttgtagatcttatagtcatcatctttcttaacgccagggtcaataatcgtgattattctgaagcccaatttacgcatcttagctacgaatttctctggtgactcatagttatcttttctccaggtaaatactctgtagccgcgcatataatcgatatccaggtgtaaaacgtcacatggtaagtcatacttacgcaagttttcagcaatcttctcaacttgcttttgactgacactgtagccccaacgtgattgttgatagcccaaagtccacttttgtggcattggtacacgaccagttaaataagtgtagttagtaataacttccttgagtgagtcaccaccgatgatgtagtagtcaatattgccatcaaccgctgagtagtagtaatagtcattactttccttacctaagtcgatgtggttgcgataagtattgtcaaaaaagataccgtaaggatgaccattttttaatcctaataaaattggaatcgacttatacaaacgggtaaagctctctacttgcggatcaggattgtcagtattccaattatcataagcatagtggcgtttgttcaaatagccggttttatcacccaagccataaaattcttcgtcatctgctagtgacttgaccacttcataataatcggcgtcatgctttcccagtaatttatccacatcatggccttcagattcagccagcttcaaatgttcctcatccatctgtcggtcaattggggttcttttcccccgataatctacgaccaatggattgccttgttcatcaaagacgtcaattttttcatcatcataagcttttactatcaacttagccgtagctatttcaatatgatcgcctttatttttaactgtaaaatcagttttaatttctttatcgccttcgatagcataagaattgctagcattacctcgatcttgaaagaatcgcataatttccggtgttaacacggtcaaaatcattggtccattctcatagtttaaggtaattttttgtccatctttagtaaaatcagtaagttgattaatcataatttacctctaaaaaatcaaaagttatgtattcgctttcaattttaacacaataagctaatcaattgggtcataccagaaaaaacaccttcagaaatttttgtatttaaatacaaaaaaactgccttacggcagttttatttaatttattccattggaaaaatcttatctggattcaaaacataatttggatcaaaaacatgcttgatctttctcaaaagttcagtgtaatcatgaccatagaaatcctcaaaccaatctttgcaggcataaccaataccatgctcgccagacatatttccatccaaagctttagctgtcttataaagttcggtaatcacataatgactcttttgctcaaactcttcgtcactcattgcatctgagcaaagataaatatgtaaattaccatcgccggcatgaccaaagttaggaattcgcataccaacctcttgttccaattcatcaactctatgcaaaacatcaggaatatgattaattggcacacaaatatcaacttcatccatctttggcgtagacttttgaatagccaaaagcaatgcttcccgacaagtccaaatcttctttgcttcctctgaattagcatctaaaattaccgcatcagctgctttaaacttcttcgttgctgcaagggcaagctttaattccgcatccaattcctctttagttaaagaatcaagccctagaataatgaagccatcgccatttgcaatcgggaatttttcatcgtaatacttttcccagagactaatgacttttctacccataaattcaacggttgttggcactacaccagaagccaaaattgctggtactgatttaattgctttatccaaattaggaaacggaataattgcattgatcgattgtttaggacgtggatataaacgcatggtaacttcagttactacacctaaagtcccttctgagccaatgatcaggtcttttaacgaataacctgatgaggacttaactgccttagcgccaaatttgtaaagtttaccatcagttaaaacaaccttcaattcgcggatatgttctcgagtaacgccatatttaattgctttcaacccaccggcgttagtatccacattaccaccaattgtagcccaatgcattgctggagctggcatataagtaaatggtttattggctaaatattcttcaatatctttcaaccgaatacctgcttgcacagtcatcgttagactttctggctcgtattccaaaaccttattcattttcaccatatccagtgaaatgccaccttcaacggttaaattgccacccattagaccagtcgaattaccacgcggaacgataggaatatgatgatcgcttgcatatttaacaacgttttcgacttcttcattagtttcaggttgaattaccaagtaaggcattgctctaaccgtcttaaattggtcatgatcccaatgaacagttggcttagtaatgaatcgctctggatctgagataaatttactcaaattatctatatctgttgcagttaattttttaaagtccatctttgacacttctttccaaattgaaacatcctatattaactaatgtatccgcttttgtaagcggtgtcaaaaacaagaactgaagatttttttatctaaaaaagcaaatttccatactacctcactttaaaatgcgatagtatcgactttcatttaaataactattacacaaaatatgaaaataaaaaaactgccttacgacagtttctagttaaataaatccgacatcttagttggaatattattgtttttcacaaaatactttttaaaagtaggtaaatctgcattttcttttttcacatacatatcatgtaaagcccaaaatgcagtgattaacaaattaacgcccaagacaattaacataccgattaaaatatatactaagtaaagcattgatctatcccccgctatatcgtcacttgacccagagtcgcatcttcaatgaagtatctgacgaaagcttgattgaagctcatgccctggccgttgtaaacatgccactcttcgcgtttggcacctacagttctaatgattgaaattactgtgcaaattaccaaatatgcgattagcacgttaaaaattattttcattaccagcatgtctacacttcctctctgtactactcaactaatacactaatatttattagtcaatttgtcaacatcttttagtatttacttttttctccccaggtataaaaagccatagatagctggtccgatcactaccgccccagctatagaaactataatcactgcaataaagcgaggcatagcaaaaaattccgagctaaatttcatacaggcccaggccccaaagaaaaaaatcgcccagccaattaaaattgaaattagcatatttaaacctgaaaatttaggtttagagtttttattgttcatcaagttttctctttcataaaaatattgtgccacaaattgaaggtcaataaacaaaagtgacagattcggtcgttttttagacttatttggtaaaaaataagggagattaagtaaaatatggcgcttaatctcccttttgaatcaataattatttgcccataagacctgaaaaagccattcctaaggcagcaccaccacatgcacctgctttagctgatacgggacgagcataactagtaattgcataatgaaacttcatcacatcatgtgacaatttaccctgccagcttaatggatcaagaccaactcgaattaagttgcagacataattagctgattcaccattttctaactcatgctttgcatcaagtaggatttttctttcttctggcttagtatcttcatttactagtaggtcagtaatattacttaatagccattgttttaaatcatctttattttcttgatacatttttatccctctttttcgactttttcattaatatcaggatgcatccctacaaccattttagaatctttcatgttcttcatcgattcatttattttaataaaaaactctgcaagtagcagagctttttacctcattgcagagttacttatacatatacttagcacatgcttttttagaatccataccattacgaatcttcaaagctaattcaatcgatacatccgcaataattgattgtgggtcaatcacattgtaaggatgatctggtgccttttcctgagctaacgacaattctgtacatcccagcaagattacgttgcagccataatcatcatgcattttttgcaagatctggtggtacaatttaccatcaaccattcccttttctttaatatcggaataaatgagcttattaaccatcggttgaatttccggaccacctaattctgcctcacggtgaaccgcatgaatttcatccacatacaaatgatcatagattgacccttcagtcgcaatcaagccaattttcttttcttgtgggtatttttcaataaattgatgcactgctattctcatcatgtgtaaaaatggaatatcagtcaatgcagccaaatcatcataaaaatagtgagcggtattgcatggcatcacatagaagtctggtcccaatttggcttggcccagaacatcgtcacgtaaatcatagaaaaagtttggtttagtatgatctttaatataagccgttctatcaggaatttgtgcatcattaaccaaaatataatttaaataatcttggtccttagctatttttacacggtgattaattaaacgaacgtagctttctgtggcaatagttcccatgccgccaataatactaaagaagtgtttcactattttcacttactttctaaagtgttcttcttgaccttccaactcattaattacctgctgtgcaaccacaatatcagatggatatggggtatttactccgcgaattttttggaaagcgtcagcccccttaccacagattagcacaacatcatctggcgtagccatggcaatcgcatcatgaatggccttcttacgatctaactcaatagtaacgtcgcacttagagtgatctattcctgaatcaatttcttcggcaatactctttggatcttcaaagcctggatcgtctgtagttaaaaatgctttatctgcgtatgcagtcaaactttcactaaaaccgggacgacgtgacacgcctttatcaccaggagctccaacaacaacaataattttaggatcgttgaattcgttacgcataaatctcattaaagccatcattgaggccttattatgagcgtagtcaactacaaccatgccgtgcttctttgttctctcggtttgcatccggcctggaatagtaacatcgcgaatacccttcgcacattgatcatggttaagtccagccaagcctgctccaataattgcggcagtaccatttgactcgttgaaatcacccagcatctttaaagtataatcaccattaattggtaatttacgtgccttatcactagcacaaactaaattgaaccgagtttctttcatatctaattgttcagaagagaatctgaaatcaattggctgcttcaagtctggattttcaaaattatcgcgggcaaacaaataaatactatcggggttggtagtagttgttgcggcagcgtagacttcatcaaagtgtgcagtttcagcgttgataatacatttacgtgagttaacaagcaattgtaatttgcagtgcaaataatctgcaaaattagggtgttcgttaggaccaatatggtctggactaatattcaggaaaaagcctaaatcataagttaaaccgaagacacgatttttcttatatgcttgactagaaacttccattaccaagtgagtcatgccattatcaacagccgttctcatgtctcggaataagtccaaactctctggtgtggtcaagcttgacttaaagctatcttcaggcttaggaccgaccacatcattaactgaagaaatcagagctgtcttaccaccatttgcttgatcaagcatccctttcaaaaagtatgctgatgtagtctttccctttgtaccagtgaaagctacaacaaacaagtcatcttgtggaaaacggaagaaagcagctgacaaaagagccattgccttagaaacatcgcgcacaattaaagcgtgcattccttttccttctggatatggttgttcagctacataacaaatggccccattgtctttagccattgacaaataagttggtctaaagcctgctcccttgcagaagaacaatgtattagtttgaatatcgcgtgagtcataagacacatagtccattttagtagctactgtatcttgcactgcgcttgacttgagcaagtgatgctcttttaagatcaatatacaggtatttaaggaaatactcattaacttttctcctcgttgtatttaaaacatttcagtcaaaattataacacagctagtgtgttggtgacgctttcttcggatcaagtggcaaacgaataataaaactagtccacttttcgtttgattcacagcgaattgtaccatggtgtaaatcaaccacacctttggtgatagataatcccagaccagttccgcctgtcttagtatttcgcgaagtttctacccggtaaaaacgctcaaagattttatttaatgatttcttcggaattggtgccccattattttcaacgcgcaactctacttcacgtttgttgactaaattggctaccaatttaattttagttgcccctgtaccatacttgaaagcattagaaatcaaattattgtaaacgcggaccagcttttccgcatcagccttaatcgttagattctttggccgcgcttcaatctctatttcaatgccatttttttctgcttctaattcaaagccggccgctacctgctccaacattgaataaatatgcaaatcattcagatttaacttagtattggtcgactttaaagtagtatattcaaacagatcgttagccagtgctttcatttgttctgccttagtataggcaatattgacatactttttctgatcttctggcgaagtcactcctgcttttaacaaaccaagataaccaataattgatgttagcggcgttctgatatcgtgcgaaacattagtgatcaattcatccttagattgctcaattgcccgttcttcattaatcgaatttacagtactatcaaccaacgaattaatcgaatccactactcgttgcaattctggtcgtacccgaaaattaatccgatgatcaaaatgaccattagcaatatagtgaagttccaaaataatgtgacgtagctgcatttggtgatagcgtcgaatcaagcgccagtacaaaacaaccaagtcgcccactcccattaagacgatgaatacgttttgccaggaccagagatgatagccacctgcaaaagtgatcgtcttttttagaaagtagattccgttgaccaggctttcatcctgcaaaatagctaagtgaatcagaatgataattgataaatttaataaaaacagaaggacgaccgttacgaccccttctgcaaacaattcgctcttttcggcgccagttagcttgacgcgttcttttttcatcttatgcctcgaccttgtaacctacgccccaaacagtttggatgacatcctcaccatcagtggctttttgaattttatcacgaaggtgtgacacgtgtaccatgacagttttagctgaaacaattgattcttgttgccaaacacgttcaaagatttcatcagctgaaaaaacacggttagggtgactagcaagtaagtataagataccgaattctaaggcagttaattggatagtcttaccatcaatagtcttaacttcatgtgaatcacggttaattaccaatggtcctacttccaaaatatctggtttttcattcttaacttgcttttgacttcttctcaaaagtgaacgtacacgagccattacttcaagtggattgaatggcttagaaacatagtcatcagcaccagtgattaagccttgaatcttgtccatatcaccggttttagcagaaacaataataattggaatatcggagtcttttctaacttccttaattacatcgattcctgacatatttggcatcatcacatccaaaatcatcaaaacgatatctggcgtagtggtcaatttagtaattgcttccttaccactatatgccgcaacaggttcatatccttcatttttaaggtagatacttaatagttctacgatttctttgtcatcatcaacaactaaaattttcacgaggaatgttcccccttcttgtttattattctctgtttttctatctacagtttagcagatatcatatagaatattttacacattttagaaaaatatactgctttcattatcctttttaaacaaaagctaaaaaaatacacgtttctccatcatgaaaaacgtgtattcattctatttactttaccttatcatcatgcaatttagtttcgacataaacgcagacgataaatagcaaagcaaaacagcagatcttaggtgctgttgcataatcaagcatgctagcaaaaccgaataagataccatctggaacaacccaccaggagccgatcgaagaattaaaggtatcactaactgtcgcaaagaatgcaattaaaatcgttaaaacaagtaaaactgaagttaagatcattcccggccgaccaaaatctttaaaaccatgatcccagtagactatcactccaagcagtaccaataagattgataccagccatagactaccctttttcataataaaggccttctttctgcccttatcctaacacgattaagtagcagctgccttgtttaacgcttattgaatttccttcttgccagtgtagagttcatagtagtaacccttttgcttgattaattcatcatggttaccatgttcaataatatgaccatgatcaagtaccaagattaaatctgagttaacaatcgttgacagacggtgagcaataacaaaactagttctaccagtaagcaagttgtccatcccggcttgaaccattttttcagttcgagtatcaatacttgaggtagcttcatcaagaatcattactggctcatcagcaatcattgcccgcgcaattgacaacagctgtatttgcccttgtgaaaggtcgccgccatcaccatcaatcacagtttcataaccgtgatcaaggtcatggataaattcatctgcgtgtgataacttggctgcttgataaacatcgtcatcactggcatctggattaccaaagcggatattgtccataattgtgccagtaaagagatgggtttcctgtaaaacaattgaaagtgattttctcaaatcatcttttttaatgtttttaattggaataccgtcataagtaatcgttcctgaatcaatatcgtagaaacggttaagcatgttagagatggttgtcttacctgcaccggtttcaccaactaaagctaccttcattcccggtttggcattaatggaaatgtcatgcaagatttgatgatctggtacgtagctaaagttaacatgatcaaaaataatatgaccacgaacttgaaccttcttggttgagccatctttttgtggtacattccagtaccacttactgccgacttcatcgtttttcttagaaagagtaactgtaccttggtcagcttctgacttttgatcttccaagttgaaaattctttctgcaccagctaaagccattacaatagagtttaattgttgcgaaatttgggcaattggcatactgaattgcttagataactgtaagaatgaaccaatggcaccaagtgaaagcggagcccaactattaattgcagcagcaccaccaacaaaggcgatcaaaacgtaaagcaagttacccatgttacccataattgggaataaaattgtagcgtaagtgttagccttacctgaggcttgacgcaactcatcattatatttgtcaaagccttccttagattgtggctcatggctgaagaccttgatgaccttcaaaccattaagcatttcttcattataaccattgatttggcccagcttcttttgttggacttggaagaagtgacttgatctaaccgttaagtagcgcacaattccaaatgataaagcaaaaataatgaaggagaacacagtcaattgccaactaagtgaaaacatagcaactactacaaataataaactcaaagctgagttagtaaattgtggaattgactgtgaaatcatctgcatcaaggtatcaatatcgttagtataacgcgacatgatatcaccaaattcattttggtcaaagtatgaaattggcaagctttccatgtgaacaaacatttcgttacgtacacgatattgcactttttgagctaaaacacccatcagcatgttaaaaaggtaattagacaaaaaaccaatcgcatagatcccaaacattaccgcaattgcagtagctagagggccatagttaggaactttttctttagttaaaggcacaatataattattgatcaaacgttcaatgaataacgagccaataacgttgctggcagctgctagcacaatagtgatcatggaaacgatgagcatccatggacttgtactattaaccagtttcaataggcgcaataagattttggttctgctaccctttgtttgatttttacttttttccattgcttgatccaaattgctcacctactttccttgttcttcctggaatttagcgattgaactataaagttcgttagtcttcatcaattcatcgtgggttccgatagcttgaatttgaccatgatccatgacgataatccgatcagcatccttaattgaaacaattctttgtgaaataatgattttagtagtttctggcatatctttagccaaagacgttctaatttgtcgctcagtactggtatcaacagctgaagtggagtcatctaagatcaagatcttcggattcttaagcaaggctctggcaatagtaattctttgcttttgcccaccagaaacgttgttaccaccttgttccaccattgtgtcataaccatctggcatttcacgaataaagccatcagcatgggcgattttagcagcggcaattacttgttcatcggttgcattttcgttaccccacttgaggttatccttaatcgttcctgtgaacagcacattcttttgtaaaaccatcgcaacgttatcacgcaaggtcttcaagtcatatgacttaacgttgtgtcctgcaacccgaacggcaccagaagtaacatcataaagacgcggaatcattgaaaccaaggttgacttcgatgaacctgtttcaccaataatcccgattgtttcacctggcctaatgtgcaaattgatatcttttaaagcatcagccttgtccgcaggttcgtacttaaagctaacgtgatcaaagataatttcaccattggtcaaacgtttcaatggcttcttaggatcttcaattgttggttcttccgtaatcactgaccactggcacctgagataaccaattgcgtagtaatcatagctaaaatgtttaaactaaacaaaactgagtttgaataagtaaacattgaaattaattgaccagtttgtaaactaccgccaaccacttcttttgcaccgaaccagcagattgacagcgttgaaatattcaaaacagctgcaactactaatgcgttcaaagacataatcttttgtgcagtcgcaaacaacttgtaaataaagcctgatgacttcttgaattctttaatctgcggttgttcttggacataggtcttaacttcacgaataccacgtacgttttcacgcacaacctggttcattcggtcataccctctaaaaatcttaggaaagtatggataagctgttttaataatcaaacccaaagcaattgcaaaaaccggtcctaaaactgcaaagattaatgataaacgcggactaataataattgacataataattaaaacgatgaacatcattggtgctctaacagcaattctgatgatcatttgatatgccatttgcacgttgttaacgtcagtagtcaaacgtgtaactaaactggcacttgaaaagtgatcaatattttcaaaagaatagtcctgcatatggtagaacatgtcttggcgcaagtttgcggcaaaaccagcagctgcatgagctgagacataactcgcactagcgcctaaaattagcgaaataacggttaacactaatagcaatagccccattttactaatataggacatatcccccttcataattccgttatcaatcaaaattccgaccaaatatggaatcagcatttcaatgataacttcaccaataacaaacattggtgagagcaaagacaattttttatattgcctaattgatttgctcaatgttttgatcatagagacccacccttctattcttttattcaatctcgcaaataaaaagataaatggatcatctccatttatcttttttatctatattaagtttaagtatgtgcttatttttacggaaattcaattaacatgcttgcaaaacaggtaaattatttatgttgttgtggccttggtgcaaatgcggaaccaacaatattgtagtgctttctgaataaataacgtacaccataggcagccgccgcgataacgatgtcagctactgctggtaaaactgggttgattacgcgcaatgctgggatttgcaaaatccacatccagacaaacaaaacaactgctatagccaacattcttaagatcagcttaaccaatgaaggacgtttaccttgctgaggcattagccaatcattgtatttaaccatgaagatccccattaaaatacctacactggcaattgtcagaatccccatttgtgaattatacggttggttcttagtttggaataatgcaaggataccacataaaccaacaaaaattgctaaataaagcaatgcgccatcaaccatcaactgccaagttggtgtagccactggctttttcttaggatgaagcatttgttcagccttaattgctggtgaagccaggtaaagcccattggctggttgcccatgacgttgggcaataataatttcactgagcaagccattagtcatcgcaactgcatcagcacgtgacattgaaccttgtttttgcagttctttttctagacgaaaaacatagtcactgttcttgttactcaacttttcacgcaaagcttttggatcttcctgcttaattttttcatcctgagtatcaagctcagcttgcttctttaatttagcttgtttttcagtgttaatttttgtttgatcttgttctctctttgtctcttcagccattcttactcctagacgttaaatctaaattcaataatgtcaccgtcttgaacttcgtaatctttaccttcaagacgcagcttaccagcttctttaaccttttgcatagtttcaagcttgtctaaatcatcaaatgaaacaacttcagctcgaataaaaccacgctcaaagtctgagtgaataacaccagcaacttgtggagctttcatccctttgtggaaagtccaggcacgggtttcaggaccaccggcagtaaagaaagttctaaggcctaagatatgatatgcagcacgaatcaaacgatccaagcctgattcttctacgccttccatctcaaggaattctttcttttcatcatcagccataccagcgatttcttcttcagttgcagcagaaatacctaagcattctgcaccttcgctttcggcatgcttcttaacaatttggtaatacttgtcgctttctggatcagccattgagtcttcagcaatgttagcaacgtagataactggcttggaagttaacaagaacaagcccttaacaatcttttgttcatcttcgttgaagtcgattgaacgagcagcattaccttcttcaagtactggctgcaatttattcaaaacagccatttcagccttggcttccttatcgccttgttgagcaaccttctttaccttattgattctgcggttaacagcatcgaggtccgcaatagcaagttccaagttaatagtattaatatcttcttctggatcaaccttaccagtaactgaggtaatattgtcatcatcaaaggcacgaacaacgtgaacgatggcatcagtttgacggatgttttcaaggaacttgttaccaagaccttcaccttttgaagcacccttaaccaatccagcaatatcggtaaattcaaaagttgtgtgcacaatcttcttagcaggaatcaattcttgaattcttgccaaacgcttgtcaggaacttcaaccattccgacatttggttcaatggtggcaaatggatagttagccatttcggcaccagccttagtaatcgcattaaacaaagttgacttaccaacgtttggtaaaccaacaataccagcagttaatgacatttgttgtcctctttttctaaaatcaattttttatttttacttacttgtctattttatccaaaatttggccgagcgatacgatcttttggcacatattgctctttttttgcattaaccggatcattcgccttagttaatagcttttttagcttccggttaaactcgctgcgcggcatcatgactatgtgcccacaacccatacattttaatttgatatcagcacccatgcgcaaaatttcccaatcattagtctgacaagcatgaggctttttcatttgaactgtatcagccaaattataaacaatttctttagccatctaaatcaacacctaacaaatcaagaatccggttcaattcttcagtcgaagcaaaatcaatcgataaatgacccttacctttttgtgtttctgaaatattgacgctagagccaaacttattagccaattggctttcgctagcccggataaaggccgatttcttgacggtctttttgctgcgaggttttttagcgttcaattcactgactaccgcttcaaccttacgcaccggcatcccttccttgactactcgcttagccagcgcatcaatcttttccttatctttcaaacttaaaagcgttctagcttgtcccatcgacagttcaccatgttggagtaaacgcttagtcttgctaggtaaagtgagcaaacgcaaataattagcaatatatggtcgcgacttacccatccgcttcgaaacttcttcttgcgttaagccaagattcttctgcagcatttcataagcttgcgcctcttcaagtggagttaaatcttcacgctgcaagttttctagaactgccacttccatcatttggctttcgttaaacttgcgaataattgctggaatagtcatcttcttagccaatttagaagcacggaaacgacgctcaccagcaatgatctcatatccattaactgattcgcgcacgataattggctggaaaacaccattttccttaatagaatccgacagttcttttaagctcttatcatcaaatctttttctaggctgataaggattcggccgaatatcgcccaaatcgagttcttggacttcttctgcctcttgaacttgaggctcatcctcaaataaggcttcaagaccacgacctaggccgcccttttttcttggctctttacttcttgagtctcttgtcatgagcttttaacacctcttttgctaaatcatcatataccttggcaccacgagattttggtgcatattctgtaattggctgaccataacttggggcctcagctaatttagtaattcgaggaatgatggtcttataaactttcttgctaaagtaggactgcacttctttaaccacttcagcacccaagttagttctggcatcaagcattgttaacaaaacgccttctacgccaagatctttattaaaatgcttttggactaaacgaattgtgttcaaaagttggctaagtccttccatagcataatattcactctgaactggaatcaaaattgaatcagatgcagtaaaagcattaattgaaagttgccctaatgatggcggacagtcaataaaaacaaaatcgtattgatcgctaattgcatctaaagctgactttaagcgtgtctcccgagccatcattgaaattaattccgtttcagcaccggacaagttgattgtggctggaaccatatctagctttggcgttgaagtatggtgaatagtatcttgaataggaatttcgtcaatcaaaacattgtaaatgtcctggtcaatctctgatttttcaattcctaaaccagaggtagcgttaccttgtggatcaatatccacaattaaaacgcgataaccacggtcggcaattgaggctgctaaattaatggtcgtagtggttttacctacgccacctttttggtttgcaaccgaaattacatttaccatattgttcatccttccctattacttccttttcaattcaattgtgatcttataatcatccggatctttattttctgttactttgactttaattcctgagtcttcggctaacttaaccgccttcttaatggtgttaatttgtacctttaagtctttaggaactcggctaacgacccgcttagcttcttttttagccttaggcttagggttaaagtaaacatccacatcttgcacaatctcttcagtttgtttaacgtttaagccttttgcttcaatttctgtcaaaacgcgatcttgatctgcattacttaagccgatcattgcacgaccatgacgagcggtaattttgccagcaatcaaagcttgctgcacattatcatccagcttcaataagcgcaatttgttagccacataagattgagacttacccatatttttagccaaagcagtttgagtcaaatcatttaattccattaaattagtataagcttttgcctcatcaattggatttaagtcttcacgctgtaagttctcaatcaaggctaatgaagcagcttgatcatcactcatatttttgacgatcgcaggaatagtctgccagcccaagcttttagctgcacgataacgtctttcacctgcaataatctcatattgctcgtcatcgccatcttcacgaactacgataggttggagcaagccatccttatcaagtgtttcagctaattctttaattgaatcatcagaaaattcacgccgtggttgatagcggttaggaaaaatcttgctcaattcaagatcttgaacctgtttattcttaggaatttcatcatcatgatgcataaaagaaaataatgacataatatacccctttctgtttaatgaatcggtttgcgccgcggggtgcctgcttgacgtggatactttttaggtgttgctttgactttttgaactaagattagagttcgttcttcttcgctctcaggtagagtcaattcttcttccttaatcagcttaccgcccagcaattcaagagctttttgaccatcatccaattcatcttcggcttttggtcccttgagggcaataaagtaaccatcttttttcaccaaaggcaagcaatattcactcaaaacactcatccgcgcaaccgcacgagcagtaacgagatcgaacttttctcgataaagcttattttgaccaacgtcttcagcgcggccatgaactaattcgacgtctttcaagtctaacttagtaattaagttctttaaaaaagtcaatcgttttgccaaagaatcaacaatggtaatcttcaattctggctgcaaaatcttgagcggaattgatggaaaaccagcaccagcaccaacatcacaaagagtggcaccatctttaaaaacatcgccaaaagtaaacagcggcgtaatactgtcataaaagtgcttaaggtaaacctcatcttcttcggtaattcgtgtcaaattgacatgctcattaacttcgatcaaataattaaaatatattttaaattgttcaatttgttggtcagttaatttaaaattgtgttttgatagttctaaaataaatttttcaggattcatttttcacccgtgaaaccgtgtttcacacctctaaatttaacgcaaaatgcattgattagtaaagatatttcatcttatcaattatgaagtatttttactcaatcgtcaaagttttgccgcccgcaaaatagggtataataaggcgcaaaggagttaaaaatatgattgttactttaattgttttagcttacttagcatataaaacatatttaggctataaaacaggctttacacgctatatcatcggtttaatctgttccgccattgtctttatggttgccattttcatgcaaaatccatttggtaattggctatacacacaatacactggagaaatgattaagactaactccactaacaacgtggaattaatgattgcacgctttgtcgctttctttattgttttcttcgtgggcaaaatgatcatgaagattgtcaaaagctggattcctaacaaaaatccacatgcgactaacttaggcagtattctcgacaatgtcttgggtgctctagcctccctaattgctagttattttgttgtttatgtagttttgtccatgttcaatgcactacaaaatccatggtttatgcagcaaacaattgattctagctttttgaggtttatcatttacaacacaccggggctttcaaacggtgtcttcaataatatctttaatattggcaaaactgtgggataaaatatatcaaaaaagatctgcttgtatcatactgagcagatctttattgatatgttttaactaaattaatactacatttatgaaccaacattcgatatacttattagcgcaggaagttttatgagcggcggctggttctcccccccggaggtgaggcctatgggctacattgatgaaagggttccagccatgtcggtttacgagagtatctccttgatgcttttgttcggtacatttttgttggctttgctgacatatattgaccaccaccaaaaataaaaaacgccgctcaaacatactttggccagttattgagtagcgtttaacgtaaaatttaacatttgaagccgccgctcttaaagcgggctgcttggagtccctaggactcctttttctttagtcattatagcatatttcactaatcaccgaaattatcatattcaatatgttcatcattataaacaaagattgcaccaattcgatcagggttatcatgccaaccctttagtggcttgccagcaaagaataatcgtttgcattcaatttctgcttcaaccgatgttttggtaaaagtagtcacaccagctaaatcagtctttacaggatacccggttctaggatcaatcaaatgatgatactttttaccgttaactactaagtagcgctcatatgtcccactagtaacggctgagcattcaggcaccataactgacgtaatattgtcgcctcgcggctgtttaggatcttgcacaccaattgaccactggccactaattcttttaggcgaatcaccaactaacaagatattaccgcccagattaataattcctgcttcaacgccatatgcacgccacaagtcacgaattcggtcggcaatccaacccttagcaattccacctaggtccagctccatgcccttcattttaagaaaaacagattggtcactgtcatttaaaaccaccttaaatgggtcagttaacagcattctatctttaatttcttcatctttaggaacatgtgcgcctttaaaaccgatatgccaaagcttaacaactggtccaatcagagcattaaagccaaaattctcacggctcttttctactgccaatttaaccaaaccatacacagcactagagacctgtaccggatgttctccagcagcatgattgatatccattacttcagattcatctcgattaacggtaaaaatatcttcgtaatgatcaattaaatcaaatgatttttgcaatagatcacgattttgagtaccaaaaatctgcaatgtaattgaagttcctaaagcatgatgatcaccaaccacctgctctaatgctaaatctttaatcataattatttctcttccaaatataaatcacgcaacgcctcacgtagttctgtcgttacgccaattttttcttgtaaaaagttatcgaaactaccaaaattctgctcaatagcgattaatgaagtatccaaaaaagcatcagaaactgaacctaaaattcgcatattagcgcgaaaacaaagattctcgccctcttcttgcatttttttatctcttttggcccgatagttattaagcatataatttgagtacaaatagtcctgtctaattgtttccatatctacgccaagcagatataacaagactacagttaccaatccagttctgtcttttccttctgaacaatgataaagtacagcacctttttcagtattggccaacagctctaaaattttatgcaagctatgttgagcgtgttctttcaatacatgtgacttgtaacgctcacacatcattctaaagccagcatactgatcttgacgataagttgcgaatacttgggttaagtctttcttaccgcctttggtgttgtcatcaacagaaattggaatacagaaatgctctacgccagggattttgctgtctggacaatggtcacattcagttggtgaacgcaaatcaataatcttagtcaagccataattgagcaaaaactcttgatcatgtctcgttatgttgctaatcttgcccgttcttaataaccgatgcatcttgaccttacgtccctgatagccaacatatccgcctaaatcacgcggattacaaactttttctaatggcaaaatatttggtttcattaatttcatctctttattaagtattttgataaaaaagccggatagtgtccctatccggtaattttactatcacgtggtaagtcacgcaaaattatttgttagcttgttcaacaaatttaataaagttagccatcatagcatctagttgcttaatataatcttcattggtcaaatcgccagtttctttatcaaaattgcttgcagcaccgccaattaagatttcattgcctggcaaaacattggcactcatgtctggtgaaagcaagatttcacgagcatcttcttgcgcacgactagatccttgaataccgtatgaagtaccaacaactgcagccggcttcatcttcatcacattaggaccagcatgtgaacctaaccattcaagcgcactctttaaggcagctggaattgagtgatcatattctggtgtagccaaaattacaccatccgcattcttaacatcctcgatccacttcttagtaacatcatctggctcatcagttctacagaaaggcttaagttgatcgatttctttaacttcaatatcagcttgctcaccataacgcttagcaataaattttgctaaaaaacgattgaaagaaaatggagcgtttgtaccaacaattgctaaaattttcatttaaataagccccctacttagtaagttgtgcataccaatcatcaacttcatcaaagaagtgattcaaaaacttaagtgtacctgcatcggtcaagtcgcctttatcatcaaattgttttggtgccaaacccatcataaattcgtcaccagcaaagacatgagcactaaaaccaggtgcgcccaaaatgctcttcaagcgagtttgcgaacgagacgcaccttgaggcattggtgaagttgacacaataactactggcttatcatggaatgggtgaacagaactagaaagccattcaagtgcactctttaaggcacttgaaaccgagtgttgctgttctggtgaagcgatcaaaaccatatctgcatcagcaatttttttacctaaagctaatacgctagcaggagcatcaacgccttctttatacataggcaagcccttaacagtcgcaaagtcaaaatcatacttatcgcctaagtccttaataatgactttaagtaatttttcgttaaatgagttatcggcattggagcccgataaagctaataccttcataaaaaccacctttcaaaaatcctcttaattatcattatagactaatgtagtttaatttatgtcattttaattttaataacaacaagaaaaaacgccttcgataatgaaggcgccctctactgaatgaaaagcacaaatgattggtgaaatttctatgccaagttatccttaagcgaagcttcttcgtcggcagcaaacattgggttttcttgagtttcgctgagacgattgttaagcatagcatcgtggatttgagcattcaacacattgacgatttgagtttggctgaagcttgcaatctcattaacaatcaatgcagccatacctgtagtagaaatccagttagcaattacgatgtcatgaatcttttgatcatcataatcaacatcaggatattgttccttgaacttttcagttccaagttccatcaaagtgtcagcaatgatcttgctaccaaacttgccatcaacgaacattgctctaaacaagttaacatgagcttgagcaaaatcaatgtatgacaaatccaagtcaattaaaggttcaccaacgtacttttgttgtaaagtatgagttctcaagtcattagagattcttctcaaaacttgattgcgaagatcatccatgttgttaaattctagatacaaaggttgggttgagaagtgtcctgctttagcaatgctacgagcagtcaaaccttcaataccatccttgattgccatcttgtaggctgtatctaaaattttgtctttactaatttctttttttcttgccattttaatgcacctcaatcattgtataaaacatgtgcttttcaatacacttgttttcttttcttcatcactataatatatccaaaaaaataacaattgcaagtcttatacactaacttattaaaaaatattatcatcgcttaaatagcgatgagccgttgtctcctgtaaattgatcataatgtgaagaagccatttcaataactgcttgcttgtccaatccttgtgcagcacaaaacgaaaagaatgcagcagataaaatatagccgcgttcacgatcatctgtcaggttatctgagaacttcatattaatcgaatgatttgcataatccgttgtcaattcaatcgatttattttctggtttactactcattctattgcaacctcttttttgttctaaaacaaataaaattaaaaattcccggatttaaaattgaagtgcaacactaagtgttaaacaaaaaggccatgaagacctaaacttgaagtgacgaaaaatcaagaaaggaagatcttcatgaccaattcaaattctagcatttctaagcactatcatcaattaaccagcgtacaacgtggacaaattcaagcaatgctggattccggcataacttcccgtactgttatcgctcaagaagttggctgccataagtcgacaatcagtcgcgaaatcaaatgcggaagcgtcctgcaaagagacagcagctatttattgtatgagcactattacgctgatactgcacagatttattatgagaagcgtcgcaaaaactgctatcagcgcaatccattgaagcattatgctgtctttttgagaatgctctccagacgctttaaagctaaatttgatgccaccagcatcgatgagttcgttggtgaattcaaaaggactatgccaggctacccttgtcccagcacaccaaccgtctatcgctatattgatcagggcttgctggacataagcaatattgatctgcctatgaagctcaaaagacgcaggaacaagcgtcatcacagccatggcggtcacgctttgcacaagaagcatcttggcaattccattgaacagcgtcctaaggaggttgaagacagaaaagctccgctgcactgggaaggagatctggttaaaggcgtcagacgcaagaatcagcctgctttaatgactttgactgaaagaaccacacgctttgaagtagttatcaagattcctgactatcgggcaagcacatgccaaaggctgcttcaaaaggagattgacagacatcctgcctggtttaaatcaatcacgtttgacaatggctctgagtttgcggatatgaccaagatcaagggctgccagatttactttgctcacccatattctccatgggaaaggggcaccaatgagaactgcaatggtcttttgcgtcaattcttccctaagggcaagagcatgaaagacaagtcaaaagcttatgttcaacaggcaactgatgccattaaccacaaatatcgccgaatcctccaatatcacacagcagaggaactcttcaagcaatatatctcttcataacctaactgttgcacttaatttgacaattcaggaaaattaaaaatttaaaaatttctattataattatattacaaaatcaaaagaattagaaagcgtgtttttatcaatgaaagtttcaacttggcgctcatcatgcacctcaattttaatcgggaaaaaggcctctctttctggcagtatcatcatcggtcgtaatgaagatgctaagactgcttggcctaagcatttagcctttaatccacatcgagataatgtacagaaaaaccattttaaatccaaagacaataagtttgaaatggatttaccaacagctagctactcttattcttcaaccccagaatggacagataagtacggagtgttcgaagaagacggaattaatgaatatcatgtagcaatgagcgccaccgaaagtgcctacgcaaatgaccgagttttagctgttgacccctttgatactgacaaaggaatcttagaagaagcaatggtcaccgtagttttaccttatgttaaatccgcacgtgaaggcgttcagcgcttaggagaaattgtagaaaaatatggtgcagcagaagctgacggaattctctttggcgatcgtgatgaagcctggtacatggaaatcggttctggccatcattgggttgcacaacgaatcccagatgattcctacgctattgtcgccaatcaactagctattcaagaaattgattttgccagtgacgacttcatgtattctcaagacctgcaaaaatttgtctacgacaataaactctggcctaaaaatcagccattcatttggcgtgatatttttggcactcatgacgatagtgacttacactacaacacaccacgagtatggagcggtcaacgtctgcttactccatctgtagcacaagaacccgaaagctttaacctgccatttattcgcaagcctgatgcaccaatttctgcgcaagacgctcaacgcgttttaagcgatcactacaacaacaccgcctatgatttaaccaatcagaaaaacagaaataatgccactttcagacctatctctgtggctactactcaggaatcacacttgcttgagttaaacggtgaaaacatgattcactggctagctatgggtgtggctgcgcaaagtgtttatgtgccattctatcctcaaggcactaaggtaccaaatacctggaaaaatggaaaagaaacctactcaccaaattcagcttactgggtctttaaactggctagcgtcctggttgatcgtaattggggtaagtacggcaccgctttaagcaatacgcaaagtactactaacgaaaaattgcttcaaattagacagcaatatgatcaaaaattagcacaagaaaaggatcaagaacaacaaattaaattagtggatgaagccaatgccaaattagctaaaactgctactgatgcttataaagaattgatcgctaaactaatcaccgaacaaactggtgactcaccgttgcgtttccaaatggatcctaacttataaacaaaaatgcctcaatgaggcattttttcttactattttttcttagtcattaagccgtccatcatttcataaatatggtcggcgtatttttctagccgcggatcatgcgttactagaataacggccttgtcacgctttttcgctaaatctttaaacaattgtcctacttcttccacattttgcgtatctagcgaagcagtcggctcatcggctaacaaaatatctgggttagcatataaggccgtcgcgattgctactcgctgctgttgcccaccagataattcatttggatacttattaaccagcttttcaatccctagctgcttgagtaagccttgcaatttatcttgcgacaaattattttgcttttttactttatcaatcaaagtaaattgctctttaactgtcaaaaatggaactaaattataagcttgtaaaacaaagccaattttattcaagcgtagttctccactttgcttagcagaaaaattactaatgtctcgaccattaatcaaaatttcacctgaagttggtttttgcaaggacccggcgatcgtcaaaaatgtacttttaccggcgcctgaaggccccataattaaaaccacttcacccttattagcctgaaaattgatatctttcaaagctgcaactttagcttcgcctttaccataaactttattaacatcttttaattcaattactgccattttactcaccaattgcctttgctggatcaaccttcaaaattgatctaatcggaatcaaactaccaataatacccatgactagcatccctaacgtaccactaatcataattgctggcgtaaaagtcattggcacagctgctggtaaagttaaatcagttaaccacatcaagataatcgcaattacaacaccaatagctactaaaattatggattgactgatcgttgcaccaactaaagttttacttggaattccttgagcccgcataacggcaaaattatgcattttttgcatagttaaaatatataggaaaacagcaatcacgatcaaagaaataacaaataagaatccaatcatcaattcaaaagttaagttttgagccgtatatcctggaagcttattaataaaggcttgaattgggtatgtcttggcatccttataattgaatttataattgctattctttgaaacaactgcagaagcggctacattaggagcgaccatccgcagttttttccaagttttcattgagccataaacaattggcgcaatattaatcttggcgttatttacaaaaccaacaattttatattttttcttagagccattcagagaaatttgatctccaagcttgtagcctttgtctttgaaactactgtctactgtaatctgattaccattctttgcttttttcccagcaattatatcttgatcttgataaataaactggtcttttttgatgcctaagaattgagctgaaattgagttttttccctttttcttaactacaattcctaattgaccaataattgcttcattcttgccaatttttgcgttttttaaatcgtcttttgtcagaattgactgactcatgctgatattggcatttttatttaaaacaatcttttgcgcattccaattttcaattgcttgtgtattctgacttgctaacccaacagccaaagatgacaacataaaaattaagtagctgatcaaaaagatcatcaaaataatcaagccatagcgcaatttttcatgcttaatttctttcagtgctagaaacataactacatcccctttgctagtatgtccaggctcttcttatagcgcgccaagttcttttcctgattttcgggatctgataagcataagttgataacttcatgactaagtaccatggcactccacaattgtggccccatattcaacaattgtcttgaataaattttgaaattatgtggtatcaagtactcattttgcgacatatgcaatttcatcattggttcatatttactgtattgaactttatcaataaacttaactactcttgcataaaaatgattaggatcaaatttttcattaggactcatcccagcatgaatgtcttcaatagcgatgtgatacatataaacatatgcatcaattaaatcatcaaaatatttataaaatgctcctcgagcaatgttggcattcttaacaatatgtgacaccttagcatctgctaacggataagtgctgaattcttctaacaacaccgcttcaatacgtctacgtttagcagacggtaaatttttaaaagtttgcttaaccattttgttttccccttttccaacacaaatgatgacttgtcatcaattacttatatcatagctgattttgacgagttgtcaatacatatacacaaaaaaagaaggcctctgccttccttctctaaactaaaactcgattatagtagtacaacctagcaacaccatcacggacgctaaatttgcttaatgcacaattatttggcgtatctatcttgtccatgtcgccattactcaaataatgagctgccatcattcgaatcaaacgaccatgtgccactactaataccttaccttctggatatttttgatatatttcgtctaaaaagttagcgcaacgtgcttcaaactctccgtagccctcaccatttttggcatatttaacatagtcgcgagtaacttttccccatggatcaacgacatccggatattccttagcaatatcatccatcttcttgccgtcccaatcaccaaaatcaaattccagcaaacgtttgtctaaatttaatttctttttacctttagtaaaaattttcgcagtctctactgctctcttcattggactggaataaacaacatcaaatttattttcatcaaacttagcggcggattttttagcatattcacgaccaaattcattcaagtctgcgtcaacttgtgcgccctgaattcgattatctttattcacgtctgtttgtccatgacgaataaaaactatttccattttttacatcaccttttcttaaaatcatacccttatttaactaatctttccatttctttactgtttttttagcgttttgaaatttaaaaagcttaaaatataaatagataattagaaaggggaaacattatgtcccgcgttacaattgaaagagatggtctcaccttagtaggagaccgcgaagaaccattcggcgaaatctatgacatggctatcctcatgcatggttttaccgctaaccgcaacactgaattattaagacaaattgccgatgatctacgcgacgaaaatgtcgctagcgtccgttttgactttaatggtcatggcgaaagtgacggcaagtttgaagatatgactgtgccaaacgaaatcgctgacggcaaggcaatcttagaatacgttcgcaccgatccacatgtacgtaatattttcttagttggtcattcccaaggcggtgtaattgcatcaatgcttgccggtctttatcctgatgtgattaaaaaagttgtccttttagcaccagctgctcaattaaaagacgatgcacttaaaggtaacacacaaggcgcagtctatgatcctaaccatattcctgatactgttccactagtcggcaataaattaggaatgaaactaggcggattttatctccgaaccgctcaagttttaccgatttacgaggtctctgcccgctttagtggcccagtatcagtcatttatggtactaatgaccaagtagttaaccctaaatatgctaaaaaataccatgatatttatgaaaatagcgaacttcatgccattacggatgtagatcacagattcactggtcaatacaaaaagtcagcatcagatttaactgctcaatttttaaaaccattattttagcgccgagtaaagtcgaactcagtacgaaagacgtaatgatccttagtacttacgtcaggttcaaattgaaattcaaaatcattaaagtcctgcaaatctgtgggattttttatttgcttctcggcaatgtagcgcaccatttcaccacgagccatcttagcgtgaaccccaacggtcttccacttaccattttttagttcctgaaagtcaaccgtaattaattgtcgtccttgactcaaataaggtttaaccaaacgtgtatattgcttggaagccaaatcgataactatattatcttcttgaaataaattttcagcgatatcactgccccagaaataatacaagctataatcacgaaaaccaaccattttagtatttaattctaggcgatatgggcaaacaccatcaaaaggccggagcataccataaaatcctgatagaatccgcaaattcttttgaatatagtcaagtgcaggttgtgtaaataaatccggagccatatattggtattgaattcctgaaaaagccaaaattgcaggggttaatcgttcatccaaattcatattttctagttgcaatatgctttgcttagtcacattttcactagcatgccaaaggtcttttaactgttcatttgaccttgacttaagaaatctttctagaattcgtgtcttatccaagaactgcggttttgactgaattggaaatgaatcacgatcaattttcataatttttgcaggtgcaataataattttcatttttagattttgttcctttacggtaaacttaaattgtgattaataagtcatgtggtaataagtcaaatgaaaggcgatgatatttgttctttttgatcataaatttgagtatatgaaactaagccttggtaaaggttgattttttaaatgttaaacttttgtttacttttaaatttagaccaatttttgaaattaagacctcggtgtcctgtacagtttgtcatctttgagcaatttaaagataactcgtactaattttcttgcagttaatgtgcaagcacgtttatgcggcgagtagacagcttcatcatacttcttttggtaatattttttgaaaacaggatcatgtaatcttgctagattggcagcttcaatcaagtaatatcttagatatctgtttccagtcctggccattggagtatgttcgttgctgtgatctcccgattgatattgattccaggttaggccggcatacttagccagctgttcttctttatcaaagcgatcgatacttccgatctcagcgataataccagctgtataggttttgccaataccgggaattgattccagaattttgctttctggtaatgcatcaacgatacgatcaattgctttttctagatctttaatagattcattaaagctttggatcatgttgtaatgaacagaaagcactgcatcaattgaatcagtcattactttgcctaagcgatatgaacctctaacagctttcttaattgctttagccaaggtatctggatcggaaaagcgtcctctgcctttaacctgtaagtaagaaattaagtcttcggtaggcatatccgcgatctcatccagagttttactatcggttacaatagacatcattgtagcaccgaaaagaggagtattaatcttatctttatcgacagtgattagtttattaacccgataatataaagcttcaatgaagtgctgtttggtacgagtcagttcttgaactaattcatatctggtacgcgttaaacgctctaaagcaagatagttgtcttgtctggcaatgcttactcgataatgtccaaagcttagatacaaagcaatgtaataagcatcgagaggatcagttttactttcttcaaagactttatgaaacctgctggtttctttggggttaattacatcagtctctacattgagcttttgtaaatcttcgtcattttggaaaaagtaagcaggatgaaaactgtaaatagatgtagcttccatgccaataatgatttgatcatagtgtttattttgagctagatctaaaatttgttttttcagttcactagcaccataaagatcattgacaaagctatcgttaattaagcgtttgttttgatcttctgaatcaagtgcaacgacctgtaaatctttagaactaacatcaataccgacaaataatttcattggaaatggcctcctttctttcaaatttctgatcatagattttgatcttcacatgttaacccctaattacagttcttaagttcaatctcgccagtataagtattcactggttgcttctttgaaagctgcacctaatcccaattgctcaaggactagcaaaaagaagcaatcaatacagcatgtgagttagagcataaaggaactgcctgggtggcagacttataaagcagacaaaactgcaggaggtgataacctagaccagttgaccaaagccaatgacaattagaggctaacatgcgaagatcaaaaagcaaatactaatttgattaattatcacaatatgactaattacaatttatataatacgaggaggaaaaataatgaatcctgattttgcaattgtcttaaattatcaacttaatgataaggctgatgccgactttttagtaaaaacagcccgtaatatcggtgctcgtgcagtgatgactgacaggcaaactgaagatttcaaaacagcttgcgctaagtatactatttttttagctaatccagaaaatagtactgacttaactaaggataacgtcattgataccatggtcaataaccgtaaagctggtaagactacaattattaatgtgcccgttgaagcaggcaagttttctgccgcaactcaagcaatgctggatacgatcaatgattggatgcaccaattcggtcacgccttcaacgaaggaaaaactagtgctttaaccagtagcgatggctttattttagaaaatcgccacgcaaattaccaaaaatatgtcttcttacctagtcctcttcctgacaaaatcgtggtagaaggcctagtcgaagaacctaaccgggtagaatggattgaacatcgaactgatcttgattttaactataaggatcaaaaattaactattaacttagtcaaaccagatgatgagtttgcttggcaagtgttgcgaattcaagcccaccgacctgaagatgacattttagaaacgaaattttagtaaaaaggcgttctttgtagcagaacgcctttttacaaccttatgtaattgctatttctattttcaaaaaaatttattcttgcttaagctttaactactgaaccattatcaaaaaattctctaaaacgacgtgcttctttatccagagtaatttcatcattaacttgcgataacttatagccaacaaaataaggtggcgcttcaaaacgtgtaatatatttagcacaaataccgtcatcattacgcggataaaagaatagattataagaatcgcagcggccattatacatgatatttaacaaatacttggcaccactttgaatccagtcagcccacaagtcaatgctatttttatctaacaagttaatattgagctcagtgtagccttgaacggggtgttcagcaatgttaacttctaccccacttttttcaaaaagggtctcaccttcaaaattattcgggtgaatatatttatagccatcttcatgttcaaagccaactatctgcatatgcgggtgaatcaaggaaccacctgaatgtggaccatagttcttgtaccaaacaattgactcatattggtcactagcctgcactttttcaaaacaagctagcgcaaaatgcatcaacttgcgattatgttcctgcgtataagtactaatatcgccgttatgatcactagattcaattagtacagtctgccaggtatcgcgcaaggtcgggaacttattcttaagccaaatcatgtcatcttccttggcgtaaatatcagttaaattttcaacatcacaaaatgggcaaacgtttttcttcttatccttacgataagattgcggtttgcctttagcaatgctcatttgaaaaacaagtggatcattagtcatatttattcctttttttatttaaaatagtttaaaatctaatgggtaaagttttactataatgtaaaatattttgtagctttactagcataaaaatacttgttatactttgttaaagcaaacgtttattcgaaatttatcaagagacgggttttaataatgcaatctagaacagaaatgagaaagcgaaacaatcgcaacaatctctatcttattattattggcataattgtcgtaattgcaattatttgtggctttgtcattcataatcaaagggtagctgctgaacgtagccagcgtgaatatgcttctacccacttcaaccctaatgtaacaatttatggtgtgcaagtaggcaagcttactgttaacaaggcgactgctaagatcaataaacaagctgataatgtcgtctttttaagaaataaaaagattattgctgaaaaagacgacaaggttcaaactatcagccaagctgaagttaaaaatattttcactaagcagcatactgatttgccaagcaaacaaaaatacgttttcaaatccgccaaaatagatgaagcaaaaaagagtttgcaaaaaatacaaaatgctgtagtcacctataagatcaatggccaggaattcaagctaaaagctgatgacctaattcacgaagttacttacaaaggtggtaaatataaattcaccgatgtaaaaaaactgcatgctaaaatggaagcgatcgatcaagaagtcaaaactctaaagaagagttataaatttactgttcctactggtaacaaagtcaatggcaaaacgattacggtaaaaaacgaaagctatggttggggaatttatgtcaagaaggctgtggctgcagtagaaaatgcttttattaatggtcaagatgttgttggtggtagtaagtatatttatggcgagggttatagtacctatgctcatggttatggcaagagcaatcatggtattggtaaaaactacgtcgttgtctccatcaaaaatcaggaactatgggttgtccgtaaagggaaagttgccgttcacttaactgacgttgtcacaggtactgaaaataagagtaacgctactcctaaaggtgtttggtatatcatgtacaaagaatcacctagcgtattgcgtggttataacgacgatggctctaagtatgcctccaaagtacaatattggatgccatttactttgagcggctgtggcttacatgacgctagctggcgtagcgattggagtaagtcagcctatcttactggtggctcacatggctgtgttaacattcgtccagctgaaattagaagtgtttggaacaacgttttaactaacgatgctgttatcgtatattaaaaaataaagattaatcgcctacttcaattgaagcgggcgatttttttgcgtaaaattaacagaaaagatatagatttttgaaaggatcaaatatgttagtcatcggtattatttgcttggtggttgctgccatttcttactttaaataccttagtgaaaagaacggacaagctaaccaaaaacaagctgaaaacaaaaatgaggcaaaatggcagcgcactttagcaatcattttcctcgttttcggaattttattaatcggttattggattgcattacgctaaaaaagacgtgaattttcacgccttttttaaatataattgattaccacattacccatattagctcttccctttaaaactaaggtaggaccgccgccattgctttttcctttaactattacattaccaaggctaatgcttaattgattatcaatctgccatgataagggaacgtagagatttacatttcccattgaagcagttagattaagcacgactgtatcacctgctgctttagcatcatcaagatagatattggcattaccgaatgaagtttcaagattaattgactgtaaattttgtgaatgaatataacgtgaagaatcgccagccatcttttgattaattacgatattgtcaccatcttcaatcacatcttgaacatgatgatgtgttacttttgtctctgtatcagcatcgtcactatcatcgtcatcattccaatgaaaactcttcttgataacaatttccggatcttttttaaaaagcaagctcaatcccattgaaacaagcaaagcaataaacaaaatcatccaagaggataagaactttttaatgcccaggggacctgcataagtaattactaaaaaagcaattgagaaaacggacaccacaatgctcttatcaagcaagcccttaattaagcaagccacaaaaatgactgtcaaaataattgtccaaacgctaattttgaagcttaataagcctaattgactgatcaccaaaagcgcagctgcagcgattagtcctactccccacaaaattcttgcaaaactgtttttcattataaagaccttctttcatctaagcatgtgcgtaattctttgtagtatcgacgggatgcatatacagttttataagtatcatgaaactgtatcttgcaatctgaaatcgaccgagttaaaccataaatttgatctaaattaataattgtcgatttggaaatccgcatgaaacctgcgcccaaaatattttctaactcatacaatttatgtttaaccaagtatgccttatcttgtgtatgcaaaattacctgcttggcatctgtttcaaaaaacaaaatctcgttcagtggtaagtagtaagaaacattgtttctaaaacattcaatctgatcattgtgttcaataccttgtaatttcttataaagctgctctatttccggagaaatatttttagctttaataatcagttcatcttctacggcatctggatcaatctcaagttttactttcatgtttctcactcccttctgaatctgatatttatattaaaaaatatttcagatagcttttccatagttttgaactaagtggtaaattttggcttctaagtggcaaaaaaaataagacgacctctgtcgtcttattgcttattatcaatgtaaactagtaaaaaatgttatcagtccaaaaataattcctggaaaattagccgtgaatagcggccaatctttcttttcaccaagaattgcataaagtacccagatcgtgcaattaattgcagcaaccaacggctgaaccggattaccataatttccgttcaaattattaataatttgcggaatatatgaaacatacatcagtacagataataccgacccaatacgtccaatagttaaaacagtttttcggtctaatcctttgaattttttcaacaaatcgctcctttgtgcttcattataagaaaagctagagtcgattgcaaaaatcatactttagtggacaccttccattagcacattaattctcttaactaaaaagaacattattaccgcaaaggctacactgaccaaaccaacagccatgaaatattgtacttcagtgccagttgaatagaacttaacaatttgtgcattcactgcttgtccagttgcatcagccatgaaccacatactcatcatttgcgaacgatatgcattaggggccagcttggtcgtaattgataaaccaattggtgaaatcaacatttcagcaatttcaactaagaaccatgaaccaactagccaaaatggactaaccttgcctgctgtaccataaagcatccctggcaaagccatccacatataagatagaccagcaaaaactagccctgctgcaaacttgcctggagctgttggctgctttttccaatgttcccaaagccaaacgaagattggcgttaaaatcataatgaataatgggttaagagactgaaagttggctgctgtaaagtgccaattaccaatatgaagcacggttctttgagcggcaaacagagctaaaactactgagcctgattcttcaatgccccagaagatagctgcagcaaagaacaatggaatgtaagccttaactcgtgaacgctcaaccttagttacttttgaactacgtagcatcatcacaaagtaataaattggcagtgcaattgctaaaatagtcaataaagtaatgacattgtcaacgttcaattgaccaaagccggccattgcagctaatacaagggcaatcaccacgaacccaataactacccacttaataatattaagcaagtcacctctatcaataggatcattaggcgtcaaactttcaggagaaaggtattttttaccgccccaaacatattgcactaagccaaagaacatcccgattgcagctaaagaaaagccggcatggaagttcatttcattaccaaaaatatgaaagccaaaaccttgtgctgcccatggaactaaccaaggtgcaagaaatgatcctaagttaatcccaaagacaaagatgctaaaacccgcatctcttctgcgatcttcaactgaataaagaccaccaaccatgtcagatacatttggctttaataaaccagtaccaaccacaattaaggcaattgaagcatataacgccgttacaccggctggaagtgccaagacaatgtgacctaacatgatcaaaacgccgccataaaagacggtttttcttgaaccccaaacacggtcagacagccagccaccaactagggttgataaataaacaagtgaaccatagattgacatgattgatgcagccgttgtttggtccattcccagaccacctttggtgactgcataatacatgtagaaaagcaggatggcgcgcattccgtagtaactgaagcgctcccacatctcagtaaagaataacgtggacaaaccctttggttgtccgaaaaatgctgtatttgaatcttgtttccccaaataaaaactcccttcttatcatagataagcacaatagaaataattataccacgaaaaaataaggatccactttttacagtgaatccttatttattaggtaattattgcttcaaattaattgattgccttagcaactgcgttgttaacagccactttttcagcttcgatcaagtcaactttaccttcaataactttaatatccatcttaatttcacgactaagaagtggaatatttacctttggttcaaagaattctttaaattctttaagtctagttggagtatggaagacgcgagtagttactgtgatgaatgttgtaaattccatgtcaccaccgacagtcttatcaagccaatcccaatcttctctaatccagtcccaggctgcttgttgaccatgatggttgctgagcaaaccagcataccagccacgcaagtcttgtggtttaattacgtcagcattttcaaaattatcaacaattaacgcaacttcggccggatcaatcgtactagtaattgcgctacgaagatcaactttgtatgaaggatcagcagttctttgatattccttgattaggttttcgattaggttgtggctaccaaagttctttacttcattgattaaaacatacggacgaacatcagcattcattgcctctaagttgtcttcattagcagtgaaaatctcatgagctgttttaattgagtctttattttcagcgtaaagactggcacttaattcatatggacgaatttgtgcatcttcatcgctttcacctggcttaactttccagcccaaacgagcaacttgaccagcggataacttgtcataaagcttctttaagtccttttcttgagctgattcaggttcaacaaattggcgcaacttagcagcagtagcgtaaagagcattaataactacacttgacttcgagtcagcaaatttagtcaaaagtggcacaacagcagcataagaaatttgtttaccttctgctaaaagacgtaagtcttgcaataattgcaatttggcaattggatcaagttcatcaacatgagccaaaatatcatcaagcaaagtcttgtcatacttaacgataaagtgcgagttgttacctacattaattctaagtgggtgacctgcttcactacgtaaattcttgtagtaacctaagtcgatttccttatcagacataatcttaggtgccttgaagttagcattcaacggaatttgccattgtctaccaacgtctttaccttcaccaacgaagaattgttgttgtgaaagctttaagtgaccatcgctactatcaacatatgcactaactactggataacctggttgctttaaccatgagtgcataatcttgccaatatcaaggtcagttgcggttgaaagagcatcccaaagatcgtcaccagtggcattaccgaacttgtggtggtcgaagtaatacttcaagccttttcttaaggcatcgtcaccaagaagtgaacgaaccataactaacattctagaacccttggcataaacaatggcactgtcgaaggcagagtcaatatctgctgggtcattgatttccatttgaattggttgaacaccgtcagtagcatctctagtcaaagctgcaggtgcttcactggtttggaacatttcccaaatatgccaatcaggttctagaccatcaactgccaagtattccatcatgttagcaaaactttcgttaagccataaattatcccaccatttcatggttactaaatcaccgaaccattggtgagccaattcgtgagtaataactgtagcaaccaatttcttcatttcaaagctagtattgtctggatcaagcagtaaatatgcttcacggtaagttactaacccccagttttccatggcaccagcactgaaatctggcaaagccaattgcaatgattgtggaagtggatacttagtttggtaaaattcttcgtaaaattcaattgcgttcttagcaacacccaaagcaaagtctaattccttaggcttgtgggccttagttgcataaacaccaattaagacgccatccttagtgtgagtagtctttgattgcaaatcaccaaaggcaaaggcaaccaagtaactagacatgcgaacagtttcttcaaagtggtggtagccgtccttgtccacttcaacctcaggcatattggcaagagcaacttcgccatcttcttcatcccacttaagcgcaagactaaaagtagccttagcttctggttcatcaacacatggaaaagcttgacgagcaaaagtagtttcaaattgggtaccaataatttgcttcttcttaccttctaactcgtagtatgaaggataaatacccatcatagtatcagtaagtggtgcactataagcaatttcaattacagccttgctgtttacaccagttgaaattttgatagcttcctctttttcaagtacttcaaaatctacctttttaccatcaaccttaacgctgtcaatggtcatatatttttggttaataaatactggattttcaattacttcaccggtaatcgttgaagtaccattaatttctttttgtttacggtttacgttaatgcgcaaatcatagtgttctggatggaaagtttcataaaaacgtttaactgtcattttttacctcctattaacagctcatttacttttaattctaccaaaataaagaaaaaagcgctcaaaaaaggctatttcttattgattgtaaggatgacgtttcagttctgtaacattgctgtcatattgagcttgtactatagaagcatagtcattaagaaataaataagttttgaaagaattaattaaatttaataaggaatgaatacatcaatgaataaacatgttaaatctactttagtaaaaatcttagctgccttagcacttgcctttgcttgtgttgcagttgcaaatgctttttctaccaatacttcaactactcaaactgttcaagctgcaagaaagctttcaaaagctgaaaaagctgctaagagatggatcgcaatgcgcgaatcaggtggtagctacactgctagaaacggtgtttgttacggcaaataccaattaaacattggctacttacatggtaacctttcacctaagaaccaagaacgtgttgctgataattacgtttacggtcgttacggttcatgggttaacgccaagagattttggttagctcacaactggtactaaaattaaattcctttaattcccaaaagctaaagaaaaccagcttagtccaattgactaaactggtttttgttttactcaaaattatcttgcttgataaaacgataaagtgcaatgactaaaactaagatcgagcacgccattcctacataggccattgttccaatgtggacagcattgtcagcagcttcacgggctacttgattttccattgcatagcccacaacccatttacgcattaataccggcgtcaagacaaaactaactgtactaataattgaagtcactaacgctacattacgcgaatatggttctttaaagaactgtgctaatacgcagaatgctggagcaatcatcaatagcaagatccacataataatccagcgcccagaacttgaattcatcatctgcgcactattagtggcataacgatatgagctccaaagcgatccaccagataaggtattaagcaaactcaagaaataagatccacgttgtccataaacaccaccattattggacagaataccttgaacaagttggaaactatcagttgatccagccgatgaaaaatcgaccgacacaacttgcttcatataagtagctaaaaacatggtaactgagccacctaattctagtgctcttaacatgcttaattttcttgaagctttcagatgaaattccagacttaaaactcgatcaggatggtgactgtgaccaatgataaaaatccctgcaatgacgatcaaggctaagataaccaatccccaccagaatttaatcatggcgaaaaataaggctaaaacaataatcgcaaccgaaatatatggtcggtcagaaaaaatattccaaaagttcaacttaacatgatggtaatttttccttgatgcatttgcgacattttgattaataatcggctgaggattactaatttttctgctgcgaaattcttcacgtgttgttgctcttgtcttagtataatcggtccgtgaacgatctgcgccggcttggccgtgctcttttttcatgcgatattcacgccgcgacatatgtgccataaactgcagcccccttctcaaagcactatagtagcacattatcacttttttgcttgaattaagaatgaaatttcaaagaaaatttagctttgttttgcatgtgctaaaatgaatattaataattgtgctttttttagaaagagataactttttgaataaaactaaatcagcaaaactgccagctggttggcatatggccttttataccttatggctcggttgctttatcactgggatgggctattcaatgacaatgccctttatttcactatttatttcagatttgggtaattattctaaactgcaaatcaatctttattcaggattagcttttgcaatgacttttattgcccaggcaatagtttcaccatattggggcagcctcgctgaccgcaaaggtagaaaactaatgtgtatgcgtgcttctggtgtgatggctttaactattaccctaactggatttgcacccaatgcaatttatattattgtaatgcgttttattcaaggttctttttctggttatattaacaacgccaccgctttaatggcaagtgaaacgccgcatgaacgtagcggctgggtcatgagtcaaatgatgacggccgggactgccggaaatttggttggaccgctattaggtggtgctctctccagcttctttggcaatatgtttggtggcgcctgggggtatcggattccattcttcattaccggtgttttaatgttcatcgtctttttaggtacaacgttcttagttcacgaagactttactccaatttctcgtgaaaagatgaagccgatgggcgaaatcatgaaaagtttgcctagcgtgaaattgattgtggtgatgtttattactaccatgttggtacaatcatcaaccatgtcaattgatccaattgtttcattatacgtaaaatcaatgatgcctcatggcggggatgttgcctttgttgcaggtgttgttgcggcaacgcctggtcttggaacgctaattgcggcatcgcgaattggacacaagatagatgaagttggaccgttacgcgtattgcgaatcggcttagtcgtcggtgcccattgtttgtaccaatggctttgactaattcgccttgggtactagcaggactgcgcttcttattagggattgctagtgcagggatgttgccagccgcacagacggtattaactttaaacacaccaagcgaaagtttcggtcgaatctttagttataaccagtcatttcaagcagttggtgccgtgttaggatcgttaatgggatcgactatttccggtttttcaaattatgcaacggtattctggctaactggatttacgttactgatcaactttgtgcttgttttgatttttgcttggggaatttcttatcggaatagataggttaagcatattcctaaagtatggaatttaaaaatgtaataaaagagctgtaaatatcacaaaaaatatttacccggatttaaaattgaagtgcaacactaagtgttaaacaaaaaggccatgaagacctaaacttgaagtgacgaaaaatcaagaaaggaagatcttcatgaccaattcaaattctagcatttctaagcactatcatcaattaaccagcgtacaacgtggacaaattcaagcaatgctggattccggcataacttcccgtactgttatcgctcaagaagttggctgccataagtcgacaatcagtcgcgaaatcaaacgcggaagcgtcctgcaaagagacagcagctatttattgtatgagcactattacgctgatactgcacagatttattatgagaagcgtcgcaaaaactgctatcagcgcaatccattgaagcattatgctgtctttttgagaatgctctccagacgctttaaagctaaatttgatgccaccagcatcgatgagttcgttggtgaattcaaaaggactatgccaggctacccttgtcccagcacaccaaccgtctatcgctatattgatcagggcttgctggacataagcaatattgatctgcctatgaagctcaaaagacgcaggaacaagcgtcatcacagccatggcggtcacgctttgcacaagaagcatcttggcaattccattgaacagcgtcctaaggaggttgaagacagaaaagctccgctgcactgggaaggagatctggttaaaggcgtcagacgcaagaatcagcctgctttaatgactttgactgaaagaaccacacgctttgaagtagttatcaagattcctgactatcgggcaagcacatgccaaaggctgcttcaaaaggagattgacagacatcctgcctggtttaaatcaatcacgtttgacaatggctctgagtttgcggatatgaccaagatcaagggctgccagatttactttgctcacccatattctccatgggaaaggggcaccaatgagaactgcaatggtcttttgcgtcaattcttccctaagggcaagagcatgaaagacaagtcaaaagcttatgttcaacaggcaactgatgccattaaccacaaatatcgccgaatcctccaatatcacacagcagaggaactcttcaagcaatatatctcttcataacctaactgttgcacttaatttgacaattcaggcaaaaaatatttacagctctttattattttcaattttttacgctaccatcttttcataaatgcgatacatccgattatcataagcgcacattgaaataaccagattatagcccgcgttttctttctgccacttttcaattgcgtcaactgcgatcttagttgcatcttctgcaggatagccatacacacccgtagaaatagctgaaaaaattacgctatgcaatcccgctttctttgccaaagccagtgaattatagtagcaagaagctagcatatgtgcatcactagtcttgccagcataaactgggcctactgtatgaattacatatttcgcaggtaaattatagccatgtgttatccttgcttcacctgttggacaaccatgcaaagtcatgcattcctcaagtaaccgtggaccagctgctctatgaatggcaccatcaacgccgccaccaccaagtaatgaattattagctgcattaacgatcgcgtcggctttcatcttagtaatatcgcctttaataatttttatgtctttcataattatgtccttagaaataaccaacatttctttctaccaccattctaacaccaacaacatcagttaggctcagaaagaatacaaagcatattgttatttttatattacgaacttgaattgatttctatctttagtatcctaatattaattttagcgttataggagcaacgaaatgaaaattttacgacgcagtttatgcatcatttcgatcaccttattttcttttgctttgagcattctcattcctagtgttcaagctagcaaaatagttttagatgatctcatcatatttttatatttaattggaatcgtaattctgggcattctgttgttgtctaacaaatttgattacctatcactcagtctaagcataatcttgctactcgcaactatcattgcttggatcagattcccaatgattagcattatttatactttttttatagcttatctgagtatatgcttactaacaatttttattgctaaaaggattaagaaataagtcactatgttttctaagaaagaactaaaaatcatcaataacgcattaattattatctatttgctttcagtcggcccaacattcagagactgtaaaatattttgtgtaaggatgaataattccttaaatttatttcttaaaacattagaaaaaggagttcctttctcgtatgattggtttgaacaaaaaaacacatacagaaagaagaactccttcatgaatgattttacaaaaaatatagcacaagctctattcaatcaagacaaaataaacgatttattgcgcaaagagctacaacaggctgttaataacttgctagaagctgaattgactgcctttctgggctatgatccctatgccagaaatggctggaatactggcaattctagaaatggtgcttatttccgcaaggttgatacccagtttggaccaattgaagtgcaagtgcctcgagatcgcaacggccagtttcatcagcacacgctgcctgactacaagcagcactctgatgttttggaaagcacgattatcaagctctactccaaaggcgtaactaccagagaaatcgctgacttgattgagaaaatgtatggcagtcattatagtccagcccaagtatcaaatatttccaagcagatgctccccaaggttgaggcttatcacaagcgcaagctaagcgacaagtttttctgtgtctatttggatgcgacataccttcctttgcgccgagaaacgtttgagcgtgaagcagtctatattgccattggcattaaacctaatggacataaagaagtcattgactactgcattgcgcctagtgagaacattgaagtctggacagagatgcttcaaaacatgaagtccagaggcttgaagcaagttgagctctttctttctgatggtgttgttggcatgaaagcggccttgaccaggacttatcctaaagctcattttcaacgctgcttggttcatgtcatgcgcaatatctgtgctaaagtccgggtggatgaccgcgaaaagatcatgaacgaattcaagcagatacatcaacagacaagccaaaaagaagctgcagctgtcttgcatgaattttatgcaaaatggaataaagcttatagccatgttatcaaaggtttgagggaaattgagcccgatctgctggtcttctacaattatcccaaacaaatcagagcttcaatttattcaaccaacatgattgaatcctttaacaacgtcatcaagcgtaaagctaagcctaaggcagaatttccaactgaacagtcgcttgatgtatttattggcatccaggcaatgagctacaatgaccgctatttcaaccgaattcataaaggctttggtcaggttcaggataccttagaatcctattttgattaaataaatgattaaaaaatcaatttacgagaaagaactatttacacaaaagatttgacagtttcaacattcatcttcggttttactaaatcaaatgatttcacaagtactttctttttaattgcaaatatcattttagtttgtttattcattatcattgctatcagaattgctaaaatcaatttcaggctaaagacacaatattatctactaggcttcatcactcttatttcaataatagaactagcctaccctggactgacattaaatgaacgcattagcaattattttgctatcggcaatattattttaggcttgctaactactaaaatctcaaagaaattagtttaaatataggacacaaaatgaaatatctgaaaacaccaagattaattaacagtattttgattactttacgtcatactgctataaattattgaattcttattactttaaaactacatcaggtattttcaatcattcaataaaaaataagactagcactaagccagtcttattttctattaatcaactattcttggggtgagaattgccatactgttccatcttggctacggtatgagccatcactcatctttgtaaatataaagacaacttttttcgtcctaattgtgtaaccgttttttgattcagttgtatcaactcggcccaaatcagccttaacacctgtttggggtggattatttttcttaatagaatatgcttgtaaaatttctttattaagtttagtcttcttttgctcagagttgttactatttttagcaactaaaatagcatgattctttgtaaaatacagatcaaaccaattacttaagcgattttctgtgttgtctactgttaatgttcgattaacccagtttttaggtaccgttgtttgattattgtagaaaaacattccaccaataactgctacaagtactgtaactactgcaattacggataacgtcattttctttttcatgatacgtttcctcttaaattcagcattaattatttggcactaagcctctcgaaatgagtcttacatttcctgaatacatgctaacccatcggtttctatttgttttaaaattgtgatccatccaggtactgtttctatacaaatagccactgtaggcaccatcattataataaactttagaaggtgttgtgttgagtaagttcattccatctcccctaccccaactactgtatctataaacattagatacatatttatgaagcggaccatttttgattggcccatacactttaacactctttgcttctcggactgtagtttctgaagcctgaacattctaactattggtagttaatactggagctacagttacacctacaagagtagcaaccactaataatattgactttttcatttttatttttcctcgtttaattttgatgttagtactactttcttacgaacagaagcaggtgcaggaatgctctttacatcatagctgtacaaatatcttctatataaggtagtagcactcttaccaactttttcacgcataacttttgaaagatatcctctataaccgttatactcaaaatagtgagtggcaccataatcataacttgaacctaaggtgatccaaattctcctaggtttatagtaatctgctcttagttttgaactcacagttgtttgtgtttcagctgatgcgctaacctgattcgaaactgtaaacaaactaacgccaactaatcctactagtgataatgaaactagttttcttgaaattgatttcatttttatacagataaagtaccttcactctctggccaaatcattattatttcctcctttcgtatcttgattatcccatgaaactctaatattacttctaaagttgcgtatcacaaaactactctttccaattagtcaccctatcttcatatcctagagaaataagcatggcttttacttctttagcttttgctatatttccttcatacaaacatttatagaaactcccacatgccttataaaaaagaaaatgattagtattgttcaaattcagtaagtaatctaaacaatttttaacctgatttccttttaagccataattacgccagcaataaaggtaattgatacaaatacttgctatcctatcttcatatttctctgaatatgaaaccttctcattgtaatgtttcaaaagaaaactaatataattatctgcttgttctgtagaaaaaacaggaatacagttatcgaataatcgcagcatatcaatattttctacccagttatcttttgcattaaattcagcaataattgtacttttgaattcgtcacctaactcatccaattgatttcgtacaattgctactgcaacaactactctgtacttaaatattctgctatcagataatttcattacttcttgcaaacattcttcgattttttctttatttgaaccattaaatgcacttttcagtttgttttcaagttttaattcaattaagtcctcttctgataaaaaatcatctttaatttgttccaaaaactgatctacatcaatatgatgggcaaacaagatcttaaatagactttctgcagaaattccttctattcctcgttcaattttagaataatggcttttatgaattattccttgaatcatttcatcttgcgttagtcctaagtgtattctttcttgtttcaaggcttcaccgatagtcatctttcatccctccaatttaacttcaactatactatctttttaattttctctccatacaaaaacgccttgctcaaaagcaaagcgttttttagcataagcaatatttgcattaacccttatcggcacctgcagtaattccgttaacgtagaacttctgcatgaagacgaacaagatggtaatagggatagcgatgattacacaccccgcaacgaattgtgcgaagtatgcggtcgcattacccttagctgtgtggaccatgttgtaaagtccatatgcaaccgtgtaagtcttagcatttcctgaagttgaaagaataatacctgagaaaatgaagtctgtccatggagcgatgaaagcggtcaaggcggtataaacgatcattggctttgaaagtggtaaaccaatgtgtaagaatacttgccacttagtagcaccgtcgatttcggcagcttcgtcgattgaccgaggaatagtatcaaagaatcccttagcaacgtagaagcctaagccggcaccaccaacgtaaaccaataacaacccgaagaggtttaacatgttaagacccttcaagatgtagtacaaagcaatcattgacatgaagcctggaaacatccctaaaaccaatgcaatttgtaagaatggttttctgaatgcaaagcgaagtcgtgataaaacgtaagcaactgaaatagttaagaaagttgaaattaccattgaaagcaatgaaataactaaagtattaatgatccagttaccaaatggatattgtggattagtaaaaataccaatatagttttgcaatgtgaatttttccggccagaaggtcgaaacgaatccagtatcattgaatgaaaaacttgctaagacgatccagacaatcggtaaaatccatagaatcgctaaaacaattaataggatataccgaaagattaatgagagccgtctttgatttgaatatgacttcatgtctagccctccttaaatgcattagtacgacgatatgcaatcagtgaaacagttgcactaataatgaagattaagatacccaatacggcactggcgttataacgctgttcctgaccgaaggtcaagttatataaccacgttaccagcaagtcagtcgatccggcaccattatacttactgttcattggtgcaccacctgtcagcaagaagataacattgaagttgttgatgttaccaataaattgttggataagtgaaggtgccatcacaaataaaatttgtggaaaagtgattgaacggaaaatttgtgcagcattagcaccatcaatcttagcagcttcaatttgatcttgtggcaagttttgaataatcgctgttgaaaccaacatagaaactggaataccgatccacatgttaacaagaataacggtaattcttgcaactaaaggtgaagcttggttatcaataaagtgaattggtgaactaatccaatgcaagttcatcaagatattgttcaaagcaccttggtagtccaagaactgcgccatcatcaaaagtgaaacgaattgtggtacagcccaaatgataacaaagattgttctccagaatcccttgtgcttgattccttttgattcaatcaaaagagcaagcaaaacaccaaagaagaaagtcgtagcagtagctgctacagcccagattaaagtccagcctaagactgggaagaaagtaccagctaagtcaccactcaaaacattgccaaatgcttggaagcctgtccatgagaaagcaattgggtgttgacgatcatagttggtaaaggccattgaaatcatgaagatcgttggcaaaatcgtaaagaacaagatacccaataatggaataaccatcaaggttgcgtgtaaccgagtatcaagcaaactcttaagttcttcaacgttagttggaatatggtccccatcacgcttcaaaatataattatgtctagttgagcgtaagttgacaatgtatagataaatgattgctacacataagatcaaggccaatacaccgaataacaaaatcaaaactgagtttgatggttgcttggttacataaacgccttgtgcggcatcataaacaacttttttggttttaatagtacctaatgtagctaatgaatttaaagtagggataccactgaggataaaccaaacaataaagataatttctgaaagtaagagtgaaataccttttacccattgtttgtttgccaaggcgttactacccattaagaagaatgataacttggtagcaatgtcaccttttgaccaaacctcgcgatatgttgctttaggagctacatgctttttctttagaaacataacttctccccttcttaggcaaaaaggctggacaatttttatttagcccaacccttgcttatgcttttagcaaattatttcttttcaatgttcttagcgagcttagcaagttgtggcttgtattgtgctggcttaatcttgccgtcgtaagtaccactgataagcggagctgcaccattccagaatgcggccatttgtggaagcttaggttgcaatactgagttacctggcttagccatttcgattacagcttcagcaaccgggtcactcttaacagcacttgagttgacagcgctcttcaatactggaatttgaccagcgttcttatgagcaattaattgtgacttcttgttagtaatgtaagcagctaaatctgaagcagccttagcattcttggtgttagcattaactgcgaagccttcaataccaaggaatgcttccatttgtacgctcttaccaccaacttcaatcttaggatacttagcaactgcgaagttcttacccaagatcttcttgatattagcagcgttccaaggaccgtccaaaatagcttgtgcgttacccttcttcaattggttcaaagcgtttgaagtttgcattacgcccttgttcttcttttgagctgcgtaccacttcaaagcattaataccgttttgtgagttgaaagttgagcccttaaggtcttcaccattcttaccgtaaagtgtagtacctgctgagaacattactggccacattacgtaagcgttagtaaagtcggtagctacaacaccctttgaagttaaagtcttccagtccttaacgtcgttagctgataacttagacttgttgtagtaaatggtttgagcttgttgtgcgtatgggaatgcgtaaaccttgcccttccaagttacaccctttgaagcaacatcgacatagttgtcttggatatccttagttgctgatggtgaaagtgggttaatgtaaccagcttcagccatttgacctaattgatcgttaggaacttcaaagacatcagcagcctttgatgggtccttaccaacgtctgtcttagcgttagctgaaccgttaggactttgaactacacgaaccttaatattcttgttcttcttagtaaagtccttagcaatttgcttgtagtaaggaacttgttcagtatccacccaaagagtcaagttagccttcttgtttgaattactgctacttgatgatgaattacttgagccgtttgaacatgctgctaatgataatgcagcaagaacagcagtactacctaaagccattttcttccaaatcttcatgactttttcctcctaaaaaatcaaaacaataaacaattcttaacaacagtagcttctgctacatatggttgtaagcttaattaataattatctgtactgcgttttcagtaccagattagttaacaatcgccttggtggaatctttatcaaagaagtgagctttgttaacatccaagcccatcttaaccttgtcacctggcttgtgataatcacgtgaatttacaatagcagtaaattcagtaccatcaacttcttggtgaagctgaatagttgcacccaaaagttctgaaacaacaacatttgattcaattactgaatctggccaggtttccataaatgcttcttctgagtgaatgtcttctggacgaataccaaagactaagtctttgtcgttgtagcctttttcttccagcagttttgccttaccttcaggaataccaatattcaagcctttgccatcagaaattcgaccgtccttgtagtgaacattgaagaaattcatttgtggggaaccaataaatccggcaacgaacatgttaactggcttgttgtaaacttcaagtggtgagccgatttgttcaactctaccaacagacattacaacaactctatcagccaaagtcatcgcttcagtctgatcgtgggtaacataaatagttgtagtacccaagtcttggtgaagcttagcaatttcagtacgcattaccacacgcaatttagcatccaagtttgataaaggttcatccatcaagaagataggtgccgcacgaacgattgcacgtcctaatgcaacacgctgtctttgaccaccggacaaagcacctggcttcttatccaagtactcttcaaggcctaacatcttagctgcttttttaaccttttgatcaatttcatctttaggcgtgtgacgcaactttaaaccgaaggccatgttgtcataaatggtcatgtgtggatataatgcgtagttctggaaaaccatcgcaatgtgtctgtcctttggagcaacatcgttcattactttatgatcgatttctaaggtacccttactgatgtcttccaaaccagcaaccattctcaaagtagttgacttaccacagccagatggaccaacgaaaacgatgaattccttatccttgatatgtaagtcaaagtcgttaacagaatatctgtcgttacctgcatattttttgtaaatatggtttaaatcaacctcaaccattgtttcccctactctctttaattatttttcattaaaaactttttcaatttcactcaatttcaactcagcagttgttggaacgatgtaatcagcttctttcaaaagctccttatcaccaattcctacggcaaattgacctgcagccttgattgcttcgactccagctttggcatcttcaaaactgattacttcatcagcctttaaccctgcaatttcttgcgctttgatgtaaatttcaggatctggcttaccatgatgaagtgttgctggatcaacaatgccatcaaattcatccataatacctaatctagttaaaatcttaggagcattcttagaagcagaagcaattaccatctttaagttttgcttcttagcatctgccaataactcagggatcccaggcaaaatgtcctttggcgtcattgtttctacttgttcaacaaatttagcgttcttttcagctgcgaacttttctttttctgcttcagtatatttgtcttcttgaccgccatattgcaagatcaagtttaatgaatccattcttgaaataccgcgtaagctatcgagctgagaatcagtaagtgtaatgcctaattctttagctaaattattccaagcagtcaaatgaaacttagctgaattagttaaaacaccatctaaatcaaacaataaacctttaagcattttgcgtttcaccttctttaagagtaagtttttggtctttaactacaacatctaaatcgtcacctttaagcaaggtaagttttgtttcattatgatcgacataaacttcgattaagcgaccacggtagttaatcttaaagccgtagtgatcccacttgtctggtacaaatgggttaaatttcaattgatcatgatcataacgcatccctgcaaaaccttgaacaattgctaaccatgaaccactcattgaagtgatgtgcaaaccatcaactgtatcgttgttgtagttatcaaggtcaaggcgagcagttctttcgtataattcgaccgccttcttttgcttgccaagttcagcagctaagattgagtggatacatggagaaagtgaactttcatgaacagtcattggttcgtagaagtcgtagtttctttccttttgttctttagtgtattgatcattcaagaagtagattccttgtaaaacatcggcttgcttgatgaatggtgaacgaaggatcttgtcccatgaccagtgttggttgattggacgctgatcttcaatttcgcttactggacgaaggttcttgtcaaggtagtcatcttgttgtaagaagatgccacgttccttgtcttctggtaagtaaatcttgtcaacgatgtcttgccacttcttcttttcttcatcagtaacattaaccctggcttgagcttccttagttgctaatggcaaacgctccaaagtgtacttaagtagccatcttgccatcgtactagtgaaccagttgttgttaacgttgttttcgtattcgtttggaccggttacgccatgcataacgtacttgttacgccacttggaccagtggactctagctgcccagaatcttgctgttccaaccaagacatccattccttcatccttaacgtatgaatcatcgccagtgtatgacgtatattgcttaatcgcaaatggaatatcagcattacggtgaatttcttcaaaggtgatttcccattcattgtgacattcaatcccgttgaaggtaaccattgggaacaatgcacctggtaagccttgttctttagcgttatggtatgcgcctggcaattgatcgtgacggtattgtaaaagtgcccgagtaacactaggatcagtaacacataagtacattggaacaatgtaagcttcagtatcccagtaagtagcaccaccgtatttttcaccggtaaaacctttaggaccaacgttaagacgttcatcttcaccgtaataagtcatgaataattgacaaatgttaaagcggataccttgttgagcggcatcatcaccagcaattacaacatctgatttgtcccagcgcttttgccaaacggcttcatgatcagctaagttttcttcaaaactcttagcttgaagcttggtcatcaattcagctgccttagcatcttgatcatctggtttgacgtcacgactagtaacaacaatgacatctttttcaagatcgtagctttcgccttcatttaactcaactgaaagcttttcatgaagttgggctgcttcagttgaaacatcacccttaactacttcaccattatgacgaagactttgcttaaggaggactgtaaattgtggaaccttgtatgggttagccttagtttcaaccttaatagttcttgcttcagcattttcacctaaaggcatccagaattttgcatcgtagttactgtcttcgttaacaacagttccatcaagtgctgcatcaaagtcgattttagctttaccacttaaaacggtagccttaactttaattaaagctgcttcttttaaggtaatatgtaaaaacctttcgaattcgaatttaaccttagtatccttaccttcataagtaaaacttctagtcagaagaccttggtgcatatcaagtgctaagtagaaatcactaaacttaactttagctaagtcaagtttttcaccattaatcgtaattcccatgttgatgaaacttggtgagttaggaaccttaccaaagtactttggatatccgttcttccaccaaccaacacgcgtcttatcagggaaccaaacaccagcaaggtaagtaccttgtaagctgtcacctgaatagccttcttcaaagtttcctctcatacccatgtaatcgttgccgattgcagtcatactttcttgcaatcttttatcttttggttcgaacttatgggtaacgaccttccaaggatcaatttcaaaaattcgtttcatatattctatctcccgtaatattcgaggttctctcttgtttacgctttcattatcctctagttgaaagcggtttacaatattaaatctgctgttaccgttatcaggattagttaacagaaaaagaaggtagatcttaatctgccttcttttttgcttattaaaagtaacttttaatgaacactcactacaaagccttttggtgccaattgattattctcataatcttgactaaacgtgttctcacaattgatctctactggatgatcggtcgtgttaaagtatgctttaattctttcattcccctcacgatcgacctcaattaacccattctctgttacgtgtaacttaattcgacctttaccgaaagtttcatcatgttgcaaacgaaagtcaatcaattgatgaactcgttgccaaaccgggccgtcttcttttgcccaatccattggtttacgacaatcaggatcgttgccaccagtcatacccatttcagttccataataaatgcatggactacccttttgcataaattcaaaagctaaggcttgcaaagccaaatcttggtctccattagctactgtcaaaattcgggctgtatcgtgtgaatcaagcatgttcatcatggctgcattggtagcatcccgatatttcatcaactggtctgtcaaacgactagttaattcttgtgctgacaacttgtgcttaaagaagtgatcctcaatttgcaaagtatatggataattcattacgccagtaaactcatcaccgttaagccatggacgagctgagtgccaaacttcacctacaatataaaaatctgatttaatatcagtaacgaccttgtggaatttcttccagaagtggtggtcaacttcgttagccacatctagccgccaagcatcaatatcgaagtattttacccaataagtggcaatttctaataagaaatcctgtacttctggattagctgtgttcaactttggcatatgcttttcaaaggcaaaagtatcgaacttaggactaccctcaccctttaatggatcgcggtaaggttcaactggatattcattaatgtggaaccaactagcaaaacgagaacttggaccatttttaacaacatcttgccattgcattgattgatcacccaggtggttgaaaaccgcgtccagcatgaccttcattccgcgggcatgagcttcattaacaactttcgcaaataaatccttgtcgccgaatgccggatcaacttgcaaatagtcaatcgtatcatatttatggttagaactggctttaaaaataggacagaaataaaggccattaacacccagtttcttcaagtaatctagatggtcaagcacgccttgcaggtcaccaccatagaagtcttcgcggccaggatgatcctccggattccacgctttaaccccttggggatcattagacttatcaccgtttgcaaaacgttctggaaagatttggtaccaaacagtatgcttaacccattctggcgttttcaccatatcaatttcatggcaatatggcactttgaaataagaaccatcttccataatggccttgtctacatcactgctaattgcacgatcacctacaactacactagtgccatcactgccaattacttcaaaggtatacttcaaacgatgatatggtgcttcaagcgtaatgccccaatgatcttcacactgccctacgccaattttttccatctcacatgttttagcctgttcaagtggcaaataattatcgcagtagtgaacaattacttttttaacgtcatttttagcactgtgaaaacgcacgcgaacatgacttggatcaactacaaaactatcttcactttcagttcggtgtcttaaagctgctaattgcatatattaattctcctttttcaacacaacacctgcataaggcatcaaagttaatttttcattagttaattgatattctcccgcttttagtgttgcaacagtataaccggctggtatttcaacagttgtcttttgatcactcaatgaaacagctacaatggcactttcatcatgtaaatcacgttgataaacatagctattcttatccgttgaaatcatataatacgttccagtctggaataaggcttcttttttgagttccagcagtttttggtaaaaattaaacatgctggtggtatcgttaatctcgttagctacgcaagcatcatcctgtttaatacctgttatccatggtttaacttcactaaaaccatggttctcagttgcatcccacggcattggaccacgggccggcaatttatgtgtttcactagccatagctaaggccgcatctttgctcaaaactttttctgcatcctttaaccatggcgctacaatttgatcttcgaattgatctgcactagtgaaatgtagattctttaaccctaattcttcaccgtaataaattactggaattccgcgttgcaaatacatcaacatcgccaagctcttagcctgagtttgtgtcttagctacgcgtgtagctaaacgagccatatcatgattattccaataaagagtaggctgcgatacgcctgctaatgtttgttgccaaactacttgattttgtttaaaggcagtcaaatctaatttcttaggctgatattgctctgaaaaacgttgatcacagttagaatcatcatcggtaaagtaccggaaggtaatcacactatccattaagtgattgcgcttagtcgtgtaatcaacagccaagttaacgctagcacttgcagcttcacctaataaaagcgtatctggataatcctgcttaatctgctcacagaaaggccgcatccattcctgcacctgtggtaagttagcgaaaaatggttccgcaacgattggcttgtttatgtccccatctccagttggataattttgtcgcaaatccgccttgccaatatggataaaagcgtctaaacgcaaaccatcaattcccttttttagccaatattcagctacctcaagcatggcgtgacgaacttcaggattcttccagtttaaatcaggcattcgcttatcaaataagtgaaagtatgattgaccggttccagctggatctggctcccaaacgctgccaccaaagaatgacccccaattgttcggccgcttgccgtcatgaccagcaaaaatatagtagtcacgatataggctgtcaggattcttgattgcgtcttggaaccaaggatgttgatcagatgtgtgattcaagacaaaatccatgatgaggtgaattcctgccttgtgcagatccttgattaagttctccatatcttccattgttcccatgtgtggatcgatggcgaagtaatttgaaacgtcgtagccgttgtccacctgtggtgaaacaaacactgggttcagccaaacggcgtttacgcctagatttttcaagtaagggatgcgcttacgaataccgttaaggtcaccgaggccatcgccattgctatcttgaaaagacttaggataaatttgatatataattgcgtgatcgtaccaatgtgccataattaatttcctccacgcatagtgtaacggattaaagaaaccgttttcaacaccatatctactgttatcgatatcaaaaaagcacaactcgcttttgagttgtgccttttcttctattcaattactaacttttagttgtgcttacgtttccgatcaacaccaaagcctaaaagacctgcaattgaagctaatgctaaaccaataatagatgctctgttttgtttttcaccagtttgtggtaatgtcttggcattcttttcagcttgaacagcagtattattactgtttgcgcgcttaccatgaacattgctattgtagctgtgattttcactattcaatcctgcggcctgattattccctgaattatgcttagtctcggtccgaatattttgaccattatttttggctttatgatgatctgctttcttacccgaattatcatcttttccaggtgtcttatcagttggtttattatctgaaggtgtagtattacctccattatcagtcttaacaactggaacagtgattgatgaacttactgaagctgaggttggagcattgtaaccatctttgatcttatatccagctggcacaccgtttttaatggcacttgaaggatcaatagttgtaccttcagtacctggaatagtggttctgccaacttcattaccattttcatcacggtagataatggttacttggccttgttgtggagtaggaggcgtgatttcaccgccaccgtttttagtataagtaatagttacaacagcatccttagtatctgcagttggagttacttcagcaacactatcttgacttggagtaaatccagtaaaggctggagcagtaaaggctggccaagtgctggttgcgtccttgtcaatgataaacttatcgttttcaactttacctaattgccagtcaccgtaaactgttttgacatttggatcagttgaaacagtcttggtgcgaccgaaccatacaacttgagtagaagtatcagtcttacctgttacaggattcttaacgttgattgtacgagttggatgagcgtacatatcactgttttcgcctggcttgtttggattgattgttgggtcggttggctcagtagtcttagtgtaagcaactgttacattagcatttggagtgtcagcattgaccgtctttgcatcaacctttgttgcttcatgcccattaaccgtggacttgtaaccgtcaactggggtgacatcatattcttgccaactaccttcagaggcaccagttgacttccaagaattattatccttagtagcaactgtccattctgtccaagtaatattaccatcttgatccttggtgccagcattttggccttcaccaccacggacaaagtgaacattttgggtaatgatgtcggtagtaccatcagtcttataaatcgtgattgtccgagtgacatccttgttcatatctttgtcggatggattgtatggaactggggtgatgttgtcagactttaagtaagtgatatgaacagcagcaccatttactggttgaccattgttaagtgccgaagcgctagaaacagttgtagtcttagttccattaacatatgaatcataatctgaaatttgtggtgcattcattgagacaaattctggttgaccacctaaaacaaacttgtggttttggatagtgcctgcctgccaattacctgtacccgtaacttcaccagttaccaagtcttcaataccattgcggccaaattctactgattgagtgtcaatcttcttttcagcttcacccggtttagtttggtaaatatcacgagttactgtcttgaacatgtccttgtacttaggatcagttggatttacgcctggagtggttggagtgatgtccttagtaccatgttcaacaagaacttcaattgcacttggagcagtagtgttaactgtttcagctgatggataagtgtaactctttgaaattacccatttttctggaacattactatcaattgtattcttttgagcttctgcacttacaattgctggagtagttgaagtaaattgtcccttaattgcatccttagctgtaaaaatcacattacctttcgcatccttataaacaatgctttgagtaaagttttcaggtgttggagttgcagcttcaacattaattgttgcaggaacatcaagataagtaccatcactaaagttaattcttacagtacccttaacgccatttgcaatattcttagttgaaggctggccattttcagcccaggtcatagtgaatgtcttggcagaatcattggcttgtgctgaatcagatgaattagtgccaccccagccattttcaagactattaacattaatcaaagtcttaaattgatcttgacttaagttagaaatattttgattttgcttgaaagttaatgactgattagtagttgaaccatagaagttgaagtaagtgttcatccaactgtcttgagtagataaaccaatgtagccgaataaatcactgtcatcaaagctatagtttacacgccacttagagttacctggtaggctttcaccagatgaagtttgttccttagagttaggatttgctggatcatagagaatatcaccggtaccatttgtaatatcccaattgctatttggagttaagataccattacctgctttgacccagctatacttaataacatttgcatcaaagctatctgacggatcttgggcattcacatacttatcaccttgtaagttataagtagtaactgtcttgtagtcacttgctgcactacccttaccatcccagtcagttctgtagacaatttgttgaatcttagcgatattaggatcaagttcatgactatcagtggttctgtgaactgaaatagttggtgtgatgaagctcgtcatactttgattgccatagtaggtatgatgctctggatcattaccagttatcataactggagcagtaaccgtttgtgtatccttacctggaacactaactgtaactggaatcttgtagaaccctggtgttgcgtcttgccctggcttcaaagtaatcgtaccagtagttgaatctactgttgcccaagttggaacgttatcacctgctacaaatttagtaccatcaggctttggtacaccatttgttgtaacaactggatcagatgctgtgctccctttttcaacagtaactgtcttataacttggactatattcacctgctggcacagcattaattgcaccatctttggtttgaacgtctaagtaagttgggttaccttgagcatccttatcagtaaaggtaagtctaatagttgcctgagtatcaccagcctttggtgcacttgcccatgaagcagtgtactgaataccggcattatctaagttaaaagtatcaactaaatcattcttttgagcgtcggttaaatcttgacctacagtaaccttaaccgggttagttacatccttagcagtagcaccagcagctttaatcgtcattggattactgtcaacagtagtgtcaccaactttaactgatacagtaccagttaagtcttcacttgcagatggagtagttacaacagttgttggagcatcgcccttccaagtaatgattgcactagtcttatcaactggcgtgctggttaccttaccatcttcaccaacagtgtattgattaattgcactaactgcttgacctgcagtcaaattcattgaattatctgtagtttcatgagctttatcaaatgcacttggagcagttacaacttctagggcaccagtcttagtggggtcagttggatctggaatgatcttgccagtgtgagtagcattgccaacataaactggtacgtgaactgtatccttagtagtatctggatacgttacaacaactggaattgtagtcaagccagttggcgtttcagtcgttggggcaattgttaaccaaccagtattaggatctactgtagcaaatggtgtgttatcaccaacaattttatacttagtaccttctggagccttgctacctgggttgattgttacagcactgccttgtggagttgattcaggatatgaaggatcttctgacttagattcaccttgttttacgttcatcggatcatatgaaggttggtaaacatcagcatcagggttagtgatatttaatggaatattagcaaaatcaacggtaccgtcttggtaggttacctttgcccaagctgacttatcgctagtcttcaaattaccagttgggttagttggagcatcttgaccgctcattaaatcttgccattccgttgcgtcagtagctgcattgtaccaatctacatttttaatagcagaaagatctggtgttatggttccatcgctagtccgtaacccagaaataccgtccttggcagttaagtcatttaaggtttgtttagtattaccatcaatagtcttgactactggttgatattgaccagaatcagttggcttagctacttcttctaaagaactacccattgcaactctttgtggagtccaccagttgaagttattcaagagtcggtttaagtatggagtttcatattttacaccatcagctggttgaccttgagtaactgttccatcaataaactgaaaactattaaacccagcttggttttgagcaagatttacttgaccgtttgagtgtaaaaatttaatttcaccattcttattttgtcctagagtgttgccggcttgagtaaagccagaaattgcattatcaccccagttgttttgagtttcaatattattgagataccagtaatcagatgcacctgtgcctttatttccttcatcccattgagcaaatggcaatttaccacctgcactagtaatagttacattattatttttattttcaagacgaagtaaagtacctgtttgatttccggtacgctggaaatttacatacttagggttggtaatagtaacatggttatagctatcaccagttccaccaccccacatagttaccaagccatatttaggagtattagtgaagaaccctttcgtaactgaatttagaactggctgagcattatcttgtaagtcaagcgtcgcaccttcatggacattcaaatcccacttagagcttgaaccactgcctgaaccaaatgagattaatggtgtagtagattgattgttatcaccagtacgaacaattattaatttaccttgattatctaaaacattggaatcagcattagtaatattagcagcaaaaccaacacctaatgaaataggagcaaagtggtaaccatcataattagttccaccattggcaccactaccatcattactttgtttagtattgatgttaacaacaccagttttgccaatgtttaagttaccagcccaaatagccattgagtgaccatcagccatgttggcatttaaattaccgtcaacttggacagtaccagtaatagcgctgttgacaagcatccctttaacatctttagattggccatttaaggttacggttgcaccttgttgaacatcaattgctggagcagtatcatttgtttcatcttcaactttggcccgcaaaatattgccaccagcgttttgatcgttgttagtcttagctgaacttacgttaaagatagtgttagaaccatccgcaaaaataatgtgtgcagctgaaacagcacttgaataattagaaacttgattccctgctacattaacggcttcacaagtgatattgttattacccttgaaggttaccgtagtatacggattatcacctatttgttgagccatcgtggtgttataaaaagcaccatttttaacatcagcagttacattttcaaatgtaaccttgttgttagctaaaagatcagttcttatgtcgtttccacccatgtaaattgggctaaaggcaccaccataactagaccatgaattatcataaccatcagcgttaatggttaaattcttgaaagcaatatcccaaggattactatctttttgattgttagtagtaaagctaagataattagcaccaaagttaatagcgtgaccttgaccatcaatatctaatcctccagaaatatttgaaccagttaagttcatctttccagagttaactagtggttgcggacgattaataccgttaacatttgtacccttattagcgacagtaatgtcactagttaatttaattgtaccgatattatagtcgtttaaagcattaactaatccttgccagtccgctacttcttgtgattgagtaccacgtaaattttgttgagtggtagctgcaacttctctaggttgtgcagctaaatttgctccaagctcttttgcaacttcatctttggtcttcttagcactgatattattgtcttgctcatttccaagtgataaaacattaaccttaccacgcatggtgctagttaaatcgttttagttaataaaaaagtccaatcttgttagactcgacttgtaaatagtaataatagaaaagagtctgatctgattgaactgccttaagcttaagcgttttagccaccatttacaagttagttttaaagatttagtgataatttgtcggcactggtatcgtttgtatgcaccggctgagtttactcatcagcgaaatattgatcaaattaaaactacggacagtctgattttggctttacttatctggcaagctaagacaggaattgaatcacaaagaagattctgtgaatgtttcaattgtttatcacactcacgttttaatcggcgttcacgtcagctattgcaattgatttatcagatacggcaagaaatgaataaaaaggttgacctgaatggacagttcttgatcattgacagctttccggtacctgtttgccaaccaattcgaaactatcgtgctaaaatttttcgcggttatgccaacattggttataaggccaccaagaaaatttacttctatggtttcaaagttcatgccattgttagcgatgacggttccattcttgattatgtcgtaacaaaagcatcagttcatgatgccaaggagacagttgaactgctggaaaatgcccatccatctaattactatcttcttggcgacgaaggctatttaggcaaagaactgcatcaacagctaaaacaaatgggttatgaactttggacaccatatcgtaaaaatatgacaggagctaaaaagcacaatgatcatcaattgatggctattcgcagaacaattgaaagcgacttttcgcttctgacctattacaatgccgagaacaatcgagcacgtagtctgataggctttcaaagccggttggaaattgcaattttagcttataatttggcttattgtctagaaagatttaactagcaccacgcgtataattcttatgtttatggacagatcgcgtatttaactaaccgtgttatcgaggaagttcacgaaaaagagaaaattatttctgaaatgcaacacgaagcggaagggttgtctgaatataatctactcttcactatccctgaattcggtgttcgaactgttacttctttgatcggtgaattaggagatattcgtcttttccatagtagtaatgctcttaatgcctatatcaggattgatcttagacattattatgaatcaggtaactttgttgccactgatcatattagtaaacgtggtgatgcgattgcacgtaaaattctttttaaatccatccaaaacattgccgtggcaagtcattttcatcctaatcatattaatgatttctatcagaaaaggaaaagacaatcttctcagccagaaactaagaaaattgccattgccgcgatacaccgtcttctcagaacgatttatcatcttgtaaaatataatcaaccctataattatcaaatagctaaagtataatttaagattgattattactattattgtgcaacccatgaaaaataaatctagttcatgagcttgttttgttatactttaaatttaactttgagccattttaattatttaattaacttttctatccagctaaattccaaggaattcctttaatatccttgactattcgtagaaaaccaaaataagcactgatgttaaattcatcagtacttacaattgtagagtccctttgttcaacccgtattgataacgactgcttacaataataaaattaagaccactagaataacagcttatggttttcgcaactttgatcattcccgtatccgaagtctactagctctcaaatctcatggtaaaaactaagctaaaagaaaaggtcagctcaagcagcttcgctacttaaactaacctcatcaaaatacctcatcagtactgacaaaggggtaaaattgtagagctaatttgattacttgcgcttcttgtttacagcagcaaggccaaacattcccaataaggtggaggcacctaagcccattaatgttaagctattgtcattaccagtttgtggtagttggttatccttagctgtcgttggttgagacgtaatcgtcttcccagtttgcatgttaggaacattaccttctagtttgccagtaacagcatttccattaggagtagtgtttgtaggcgtattagtagctggtgttccttgtccttgatgatcattagttgttggttgaccgccattagttgggatcaaccaacaactaatgatttgattagggttaccatccttgaaggtgtaagatgttggaacactttcaccaggaactaattgataaccatcaggaatgtgaatattaactggaactgtctgaccagacttgccaggattgtccggaagcttatcgcttggtgtctttggatcagttgttgttgtctctggcgttttgggatcagttggatctgtgtccttagtgtaaacaaaagttgtggtgtattggtatacagtatactggccactcgttactccaagagtacgaacaagacgataacctttaattttcttaggttggacttgccatggaccatttgcataccagcctttttgcggattaaccccattatttttttggttaggattatctaggttgaacgcaagcgtatcattattcctaagcacatttccttgctcatcaatgtacctcacagttactggtttgtttggtagcaagtaaacatgtatccccttagcgtaccaattgaaataatcagaattaagatatgtccctgtacttcctatataggagtaaccttgtttttcgtaatggctaatctcctcactcatttttttctcataattaccattgtttaggtcaatccttttgccatagctaccagcaatcgtaaagaatttgtacggtagatttgtttcttctggaacaagtaacaattcagtcctattactatcagaattattttttataaccttcttatacttgaaagttaaataaacatagttaggatcagctaacgaatttcgagtttgaccagtgattttaccctttaaaacaggttcagaaactaatttatatccaggaatattaatggctgcggcttcatagcgtgatgcatccggtgctttcttatcaccagcacggtgttgtggagattcaggggccatccagaaactatctagaacgattgatgctaaaatatgcccgttatctacatcaacatactctactttgattggtgacaatgatgcgtaatctaaattaatgttaatgtcttgcgtagtaatacctttcttaaggcaggcattaccttgtttatcaaaatagaaatacttattcaaaacttctgaattcattaatttataaccggccacagtaaattcttgatccacactatcccctggtcgaattgtggtctgcttgaaaggttgtttgaatacataatgaccattactaatcacttgaattggcttatgtagggtgacatcgcgaaaattcatagtaatgttgtacttactgggcagtggttgttttgctgttgttttatttggaactaatgttgatgaagtttgatgaccaaccgtatttgattcgtcgctaatccgaatattgcttgaatgggcactaacttgtggatcagtcacttgagtcgtggatgtattttgagcagcaactgtcgtattatctgccttggcattaccactaataatgaaggttaagcccaacgaaactgtcaaatcttttgtgtaaatagttctttctcgtaaattgattttttaattatttatttaatcaaagtaggattctaaggtgtcctgaacctgaccaaagcctttatgaattcgattgaaataacggtcattgtagctcattgcctgaataccaataaaagcatcaagcgactgttcagttggaaactctgccttaggcttagctttgcgcttgatcacattgttaaatgattcaatcatgttagtcgaataaattgaagctctgatctgcttgggatagttataaaagaccggcagatctggttctatgtctttcaagcttctgataacatggctgtaaaccttgccccatttggtatagaagtcatgcaggacagctgtggcttcttctttgtttgtctgttgatgcacctgtttgaattcgttcatgatcttttcacgatcgtcgacgcgtactttagcgcagatattacgcatgacatgaactaaacagcgttgaaaatgagcttttggataagtctgagctaaggctgttttcatgccaacaacaccatcagaaagaaaaagctcaacttgctttaagcctcgggatttcatgttttgaagcatatctgtccagacttcaatgttctcgctaggcgcaatgcagtagtcaatgacctccttgtgcccattaggcttgatgccaatggcaatatagactgcttcgcgctcaaatgtttctcggcgcaaaggaaggtatgtcgcatccaaatagacgcagaaaaacttgtcgcttagcttgcgtttgtggtaagcctcaacctttggaatcatctgcttggaaatatttgatacctgagctggactgtaatggctgccatacatcttttcaattagatcggctatttccctggtggtcacgcccttggagtaaagcttgataatcatgctttccaagatatccgagtgctgcttgtagtcaggcagcgtgtgctgatgaaattgaccgttgcgatcccgaggcacttgcacttcaattgggccaaattgcgtatcaactttgcggaaataagcaccatttctagagttgccagtattccagccatttctggcatagggatcatagcccagaaaggcagtcaattcagcttctagcaagttattaacagcctgttgtagttctttgcgcaataaatcatttattttgtctggattgaatagagcttgagcaaaatctttggtaaaatcattcatgaaggagttcttctttctgtatgtgttttttttgttcaaaccaatcatacgagaaaggaactcctttttctaatgtttaaagaaataaatttaaggaatcattcatccttacacaaactattttacagtctcaaatcaagctcaagtcctgtcactattgagctttcttagacgtaattagtttttatatgatctgtttcagtgcaatttgtatgaatcgtggcagttggttaataaagtcattgattacttcatctatcttttcaaaactattctgtttaagctcttttaattctgaaattaagtagaccaatgcatctacgaatctaatatcaggtaaggattcgttcattagatagaataaatctccgattgtcttatcatctgtattttgtctttcctgccaggtcaatagatcataagttattgctgtaactgcgatatagccacattggccatcatagctttgaacttgagatttatctaaagcaagatattgcttagacgtcttaaaatatgtttcaatttgccatctacgaccataaagttggatgatttcttcagggctaagctttgtctgagtagtagctaaaaccaaatacttgttcttgtttccacggttggagacaaagacgagctttaataaaaagctatgtccatgatattgagcctcaactatgcttgaataaagataatgtttctttttacggatgtttgaagcagccaaacgatcatacaagtctttaacgctatagcggcgatggcgataaatgtaataaatctttgaactcttcttgatcatgccaagtccatctaaaccgatcttctttaaaatccaaaacattcttggagaagaaaaccaagaatcgaataagacgtatttagcttctactcctaatcgtaaggcttgtctaatcaactctacagttacatcattcatctttctctgagcttgatttctccttttaccagaaattgaacgttcatcagcagtaatgggagcagctccaatcatatttttcttggttttggttgacatcaaggcaaagttaaccggcaagaaggtattgccatcgctccagcctaaagttaaaccacgatatccgttcaaatactcatgcttgtcatggtcatagactttagctagcaattcggtctttttagaaaaagaccgagccatcagcgtatcgtcaacgataaaagcaagtcggcgtcttttatcgataaatggttttaagcagccaatgagccgggctgcaatcaagcataatagtttttgccagttgattcttccatcgttaagtacattgcgagcagttctaacggaaaaacgtttgtcatccttagctctgaataaagaaagccgagcaaaatgtactgacatcagccaagagataatcatggttaatgaaacggtggatttacgcttaaaattgacttgtttagttaacttagctagaccaattagattaataaatcccggatttaaaattgaagtgcaacactaagtgttaaacaaaaaggccatgaagacctaaacttgaagtgacgaaaaatcaagaaaggaagatcttcatgaccaattcaaattctagcatttctaagcactatcatcaattaaccagcgtacaacgtggacaaattcaagcaatgctggattccggcataacttcccgtactgttatcgctcaagaagttggctgccataagtcgacaatcagtcgcgaaatcaaacgcggaagcgtcctgcaaagagacagcagctatttattgtatgagcactattacgctgatactgcacagatttattatgagaagcgtcgcaaaaactgctatcagcgcaatccattgaagcattatgctgtctttttgagaatgctctccagacgctttaaagctaaatttgatgccaccagcatcgatgagttcgttggtgaattcaaaaggactatgccaggctacccttgtcccagcacaccaaccgtctatcgctatattgatcagggcttgctggacataagcaatattgatctgcctatgaagctcaaaagacgcaggaacaagcgtcatcacagccatggcggtcacgctttgcacaagaagcatcttggcaattccattgaacagcgtcctaaggaggttgaagacagaaaagctccgctgcactgggaaggagatctggttaaaggcgtcagacgcaagaatcagcctgctttaatgactttgactgaaagaaccacacgctttgaagtagttatcaagattcctgactatcgggcaagcacatgccaaaggctgcttcaaaaggagattgacagacatcctgcctggtttaaatcaatcacgtttgacaatggctctgagtttgcggatatgaccaagatcaagggctgccagatttactttgctcacccatattctccatgggaaaggggcaccaatgagaactgcaatggtcttttgcgtcaattcttccctaagggcaagagcatgaaagacaagtcaaaagcttatgttcaacaggcaactgatgccattaaccacaaatatcgccgaatcctccaatatcacacagcagaggaactcttcaagcaatatatctcttcataacctaactgttgcacttaatttgacaattcaggtagattaataaatgaagaaattaaggatttagtatcattttctgtgtcgatttgttctatactgttcattgcgcaggatctcctttactttttaggtcgacacttaaagtataacgcagagagatcctgcgtttttatttttgataagaaaaagccaagaggcgcggggaaggagcgttaatcttagctttcaagtttcagaaataattttaaaagcagttaaaaagcacctctgagttatcagacgtgctcgttatcttttcgatttatctagttgattggcgccgaatcagcttcggtttaagcattacttcaccttgaggtgaacctgattgggcaatcttttgcagtagcattttagctaacatttcacccatttcaaaaattggttgtttaattgtcgttagctttggattagaaacttgatctaaaaagacaccatcaaaaccaataactccaaagtcttccggaattcgagcgccttcatcttgcaattgccgtacaacacccactgcaattcgatcactggcacagacgaaacaagtatcttttttaaattccttaaaatgttcatgaatcacatcttgcgcagcatgactatgattagaaacccgaaaaatttgtggtatcaactggtgttgttgcaaagtgttgatataaccagcttcacgtgaatattcaaatggctcttttaaatcaattccaataaagataatgtgcttatataaccggtctaaagcatattgagtagccatcttctctgctaactgattatcagaatcaacaaagtcatagccgcggtgattttcaccaaataaaacaaaaggcttatcgagtttatcaaataattcataatctttgtttcgcgccccggtaattaaatagccatctgcatgttccttttcaatttgattaggatccgtaactaattgcatcgcatactgcttagtatttaaaccacgagcaaaaccaaaaagcaagttcatatagtatggctcagtggtatcaatatcttctaaagtgacgaattttaccacgttagtccgattattaactaaagcctgtgcaattgaattgggatggtagtttagtttctccattgctttttctaccattgctcttaattctggcgttacttgctcaggatgattaatcactcttgataccgtcatttttgatacatttgcttctttagcaacatctgataaagtagtcatattattcctattctaagtacatctttctgaatcggtttaaatctttttggctaaagccaagctcttttttgaaaaatccatcaaaactgccccagccttggcgaatagtttccgtaattccacgaatagccggtccctctcccttggtaatattcattttagaaactaggctagcaatttcattatcatcggggaactgtttagccaaagcaaagtcatacaattcattggtcaatacgcgtggtgctagttaaatctttctagacaataagccaaattataagctaaaattgcaatttccaaccggctttgaaagcctatcagactacgtgctcgattgttctcggcattataataggtcagaagcgaaaagtcgctttcaattgttctgcgaatagccatcaattgatgatcattgtgctttttagctcctgtcatatttttacgatatggtgtccaaagttcataacccatttgttttagctgttgatgcagttctttgcctaaatagccttcgtcgccaagaagatagtaattagatggatgggcattttccagcagttcaactgtctccttggcatcatgaactgatgcttttgttacgacataatcaagaatggaaccgtcatcgctaacaatggcatgaactttgaaaccatagaagtaaattttcttggtggccttataaccaatgttggcataaccgcgaaaaattttagcacgatagttgcgaattggttggcaaacaggtaccggaaagctgtcaatgatcaagaaatgtccattcaggtcaacctttttattcatttcttgccgtatctgataaatcaattgcaatagctgacgtgaacgccgattaaaacgtgagtgtgataaacaattgaaacattcacagaatcttctttgtgattcaattcctgtcttagcttgccagataagtaaagccaaaatcagactgtccgtagttttaatttgatcaatatttcgccgatgagtaaactcagccggtgcatacaaacgataccagtgccgacaaattatcactaaatctttaaaactaacttgtaaatggtggctaaaacgcttaagcttaaggcagttcaatcagatcagactcttttctattattactattacaagttgagtctaacaagattggacttttttattaactaaaacgatttaactagcaccatgcgtattggtcaataaataatcacgcgaaatggtgtcatcatcaacacctaatgcggtcaaaattaacgccgaagtcatgcctgttctatctttgcccgcactacaatgataaactaacgcatcttcttcaggtaattcaatcaattccgcaaaaattttagcaaattcatgttggctatgtgaattaagcaaaacctgttggtaaatttgaccaagccaattgtcacccatatcaggaatatgatggacaaagcgatataacttgttatcgcctttattttgcttgcggttttcagaataaatatgtgcatcaacaaaacggacatttgaccaaagcttgtcaggcgctgaattttgttcatatttagagcgtaaatcaacatctacggtaattcggcgttcaactaacttttcttgatcttccttcgacaaggagctaagtgaatcagaacgatatattttgttccactttacatgttgacccttgtcattttggtagccgccgatgtctctgaaattcagcggtccatccaaagctaatattcgatcatgcttcatttttccttgcctttcctcattaaagtgttaataccgtacttttattatatcattatcagtcatgtgcaaataaccgagcggcacgaattgctctttgccaacctgaataaagtttttcacgttcaactgcactcattttcggctcaaaggcctgtccaatcgtaaaggtatgctttaactcgtcaatatttttccaatagccaacggcaaggccagctaaaaaggctgcacccatgctggttgtttccagcgttttagcgcgttcaatttcaatccctaaaatgtcagcctgaaactgcatcaggtaattgttgttgctagcaccgccatcaacacgtaaagcaggaatttcaatgcctgaatcttgttgcatcgtatcaacaacgtcacgggtttgataagctaatgactgcaaagttgctttaattatatccttgtcagtagttccacgtgtaacaccgaagattgaaccacgagtctccgcatcccaatatggtgcgcctaacccagtgaaggcagggacaacgtaaacctcgttctctgatgtcgactcaagcgctgcttgttcagagtctggcgcatgcttaatcaacttcatcgaatcgcgtagccattgaattgcactaccagccacaaagattgatccttctaaagcataagtaatcttaccattaatgccataaccaatggtcgttaacagattattgttagagtctgttggcttgtcccctgtgttcatcacaataaaggcaccggtgccatatgtgtttttcaccattcctggtttcaaagctagttgaccaaataaggctgcctgttggtcaccggccatcccagcaattggcacttgtccaccaaagaacatatatgacgctgtttcaccataaatctctgaattcgagcgcacctcaggcaacatttgcttaggaatattgagcaaatgcaaaatatcgtcatcccacttgagcgtgtgaatattaaacagcatggtccgtgaagcattagtgtaatcagtcacgtgtttagcaccatcagttaacttccaaactagccaactatcaatcgtgccaaaaagcaactttccctgttcagctttttcttgcgcgccaggtacatgatcaagaatccagcgaatcttagttgcactgaagtatgggtcaataattaagcctgttttttgacgaatttcattactatagccttctttttttaatttttcagctaattctgttgtctgccgtgactgccaaactattgcatgataaattggctcacctgtatccttgtcccaaacaacggtcgtttcacgttggttggtaatgccaattgcggcaatttgattaggccaaatgcccgaattaataaaagcattggcaattgttgtttggaccgccatccagattttattagcgtcatgttcaacccagccaggctctgggaaatattggtgaaattctttttgggcagaagcaacttcacgtccatcatggtcaaaaataattgctctagtagaggtggttccttcatcgattgctaaaatatatttttctgtcacagttattctcttttctacaaaagcgctttcttataatattactgtttttctgatgcagattctagcagttaatgtaatagatacggtataatttttataaggattttttaaggagggcattttaatggaaaaaaatcaaaaaattgcggtaacaattgcgggtaacgatagcgacggcagcgcaggcatgccagcggatctgcattcattctacgcccgcggtgtttatggcatggggctgatgacagccgctgttgctggcaataccaaaggaatttttgcccaacaaattatgtcacttgattttattcaaaagcaatttgatgtactaaacgatgatttcaagattaatgcgactaagacggggatgctcgccaacaaagaaattatcgactgtgttgccgataatcttaaaaaatatgacatgggtaaaatcgtgctggatccggtcatcgttactaagcatggcgctaccctgcttgacgacgatgcttatcaaactttcttagacaaattattgccgctagctgatgtgattacgcctaacttttacgaacaaaaaaaactgaccggcttagaattaaataataaagaagaaattcacgccggggctaaaaaattgcaagcgatgggcgctaaaaatgttctgatgaaagggcgccacgattcagatacgcaaactacagtaaccgatatcttgttaactgaggacggtgaattccacgaatttactaagccattctttaaaaccgaccgcgtaaacggcactggtgatactttatccgccgtgattgcggcagaattagccaagggcaagtcagtgattgacgctgtaaaaattggtaaggactttacctatgacgctatttctcacccaattgatgttggctcaaaatggggcccaattaatcatttggctgcacaagaagaaaacgaataactataaaaaataccgaagctcagatttgaaacttcggtattttcgtgtctattttatcttctttaggcctactatttttcctgaatctagaacacttaccttcgttaattggttattattgtacttatatgatgtaccttcatccgaaagacgtcttgtgggtggtcatttgaccactctttttttacgcaaaaaaacagcaatgaaatcaatcattgctgctaatttgtttactttttctcaattacaaaataatatcctgctgtcaaaatttggacaattccttcaagtgcaatcgcccaatctgcaccgaaatgcgctacgatcagtccacctaaaaatgacccaatcggaatcatcgacgacaaaatagaatcgttaattgtttctactctacctaaaatatgtgggctaaaactctcttgcaccaacacttcaaagttaatattcatcatcacgatccataattcggacgtaaaaaacaaaatcaacaataaaagcggcatccctttgggaacaactggttcaaggacaattgctaaacctgataacgtgagacaaatgacgactaacctttcaattttgcttttatcaaaagttagtcgctgtaccagtacactgccaactaatccacctattgatgaagctaattctaagccaccataactaattgccgatttagtcaaatgttcagtcgcaaaatacggcaaacccacagatgaaatgccgtaaaaaagattagtcactgcaaaaggcatgatcaaccgtgctatcttgtcttcttgtttcaaattttgccagcctttaagcaaatcttgcccataattttctgtgaaatattcattcgacttatttggaagtaataatttcctaggcaatattagtcgtgtataaaaagctagggcgcttgcaaaaaatattgcagaaataattaccgtggagtcaaatgacatccaagtaatcaataacgttgccgctgcattcaaaaacaaatccagcgtcttataagtcatttggaaaacgccatttactttagttagcttcgcttttgaaacgatgactggcaaaattttttcttcagcaggataaatcaaagttgagccaatcgttgaaatgacgtatacccctagcaaaagccaaatcactaaatcgcgccacaacttaacttgaaacagcaacgtcgctataacgctggtcactatctgcattagagttacaagcgtaagcatctttttgatataaacacgatcaatcagcggcccgaagacgaacgacaacatttcaattgatgagtctgcaacaaagattaacgacaagataagcggcgaatgaaagcgtaccttgaaaaaccacaaaatcgccatataaaatagcgaatcggcgatattggttaacactcgtcctgctaataatcgtctgacattgacattttctttttcgattaagttaaacattttcccattccttttcacaacactattaatgccgctgaaagccagggaaaattactattcaattgtagttaaaactcccagaccttcagctaaaaatctgggttgagcctcaagtagcgtttgacgaatgaaagaaaataattcattcgcaaacttaaacctaaaatgtcacgcattttagtcctcgctttctgtgaaaattaagttaattatagcatggatagcgacttatcaataatagtcattctatccttatatttttcgtattttcattcaatttcaaatcatgacttatgataataaccaaattaacttgcgctatttcctgcaatagttttaatagatcactttgtaactcaggatagatatttgccaacggttcatctagtaaaaaacattgcgcgccagtttttaaaacagcagaatataactttactaactgtatttcacctgttgatagttcatttatctttctatctaaaatcttttcaattctaaattgtggcgaatcaaaaacttttgcaaaatacttgcttttataaacctgacttttatcagaatatgatcctaaatagtccctcactgaacaattaggaagtggtatatcttgaaataaacaacttatatttgattctctcagttttcttttattaattaaatcagcatctataccatttatggttatttttccttcctttttcggcgtgtataggccaattattgttctgagcaaagtagattttccaattccatttctgcccctcacaatataaaatcctggagtaacaaaattggcagaaaaatttgaggtgaataagggggttttttcatctaaataaatattaaaatcctgtacttgaatcaaatttattttagaaattatttttttaccatcttgttcattcttcatggttagtaaattgttgattctcatccacgctactttaaacgattcaaatttaaataagatagaaaaaatttcatcaacctgtcccaaaagttgattaaaatattgaaaaataattgaaaaggaaccgattgtcatcttgccggaaatcactgataaaccgccattaataaacaatactaattgaaaaataagttgcaaaacaatctcgctattagacatatgtcaactaccctagactgaagtctagggcttagtggctcgttagcttgcgctaaccagaacaccaacttgcttagatacggacttgacttaccagcaatagtcttttgactattgccgatagaggtcgtctaattaccaaagccttttgagtccgcgagttgctaacggactacagcctttctaggctgctttttttattttaggattctgccacttgcctaatcctttttctaagatgttcactgccgcattccaatcacgaatatggtgcgttcaacagattggacaagtccattcccgatctttaagcgttagtttcttataaccgttttgtcccataatactgccacaagcatgacagcgttgagtagtatatttaggatcaattgttagaaattctttgtcatatagatctgccttataagccagcatgttcaggaagctgcgccaaccaacatcagaaatagcttgagataaggcatgattctttaacaggtttctgcttcttagttcctcggtaactactaaatcgtggtttttgattagtgcagttgagagtacttgtaaaaagtcactacgctgtcttctaatcttgtcgtgcagtttagcaactattagacgctgtttttgatagttttttgctagccgcaaattgcgtccttcttttttagcccggcgctgccggcgagacaagacacgttgagcgtgagccagtttcttttgggttttgcggtaaaagcgtggattagcgaccattgatccgttagatgctgtcaagaaattatcaaggttgagatctattccaatttgactctgcgtcttaggcaaggctttaacaaaggcaatatcgctgcctaactgcattgataagtagaactgctcgtcagcggtctttttaatcgtgactgttccaatacgagttggaatatgattaagcaagcgctctttgattagttttctaaagccggcaatgcggacaattcccagcttaggcagtttaacgtgctgagcatcaataaacctagctgtcccgttatcaagaaaagcttctttttgcttaggatattgacagttggtctgatatgaccagtcgctgcgttttttatggaaagttgggattccatgaccaatcttacgatagttgttccaagctttctgatagttttgaatcgcattggcaagagcgagactatcaatttctttaacacgtaaaaagctataagcatcgcggatattcttaggcttagctaataacgagttattaatgactacttcttctgccagcttagtctcataattattaagaatagaaaagacaaaaggcattgcttgatattgtctaacagctaaatagtgcttagcatgataattgcttcgattgcgtcctacataagagttgtatacaaagcgttgcgcatcatagtttagtttaatgattttcttttgcttagaactaggataaaagcgaagcttaacgccaaagtgataggctaaactgctcattcttttcatgtgtttcacctccttctgtagattagatatttatattttacaggaaagccgaacatatgtctctatttttttgaataaaaaaagctgactgctaggtcagcttggccctatccatccccgcattaagatacggggatttccgggcattttcattaaattgagaagaaaatctcgcttagcaacgcctaaaagcgttcttttagtattgctccatctctcagtttcgattttctctcttcgattaccttttatttcaatatatctgcttaaccattcagtaaaaccagaaaagtactcattataagcttctttcaattttaaactaacttcaaaaatcttagatcgcaaaaataaatatatgagactatatgcaggtaacaggatcgctattaacaataaaaaaccagacccagccataaataaatatgtaaaaatcaaaattgaagaaagggcgattgaaataatttgatttattgtttggaataaaaaagtcaacacttcagtagtatcttcagtaattttatctgctgtttgaaccgaattcatctttgtaactgctagcgtatccttcacatacagttctttcattattacatcattaacttccatgtttatttctctaaatcttaaaatctgaattttgttcataaaatatgacaacaaaagtctgataagacttaaagtcgttattaatacaatactacgtacaaaagcagccctatcagccttatatactaaggaatttaacagtattccttctaagtaaacattaaaagtcaaaatgccagtactgataatattcattcctaatagaagccaatattcaattttatactttttatcaattttgctaaaaatcgtatgcatagtgtcacctaactctgactagcagtcaaaaatgttaaaatataatgaatataaaattagataaattttatattcttatttatcctatgtcaatactaaataaattgatttggttttactttcatgctgtatttgatattatgtagttactaactaccaaataactatctatcaactacagaaagagaaaaatatgactgaaaaagcagcaattaacatccgtgttaataaagaaactaagcaaaacgcagagaaagtattaaacaaactaggcatcccgatgtcagtcgcaattgatatgtacttacgacaaattgcattgactgacggcattccctttgatctatcttccaagaaaagaaaaaagaaaaatgatcacgaaacagcaatgatggtcgcagaagctacagctcaatatgaaatcgttaaatccaactgggaggataaattagctgagtttattcctgactggatgaacatgaataagatgactaaagaggagcttgaagcaaggttagctaagcatgcccaagatgcaagagatggtaaaagtgtcgagattagcaaaacttttagcgacctgaataaagaattaggaatttaaatttcatacaagaatatactgtcaaatcaagtcctaacgtatctgtagaacttaaagagatatatagctctatcttgcaattatctcgatctccaaaaactgctcgagattatgtaaaagatcttgaacaaactatgcaagcgttaaattattttccagaaagatatagaaaaactccttcaggaaaataccgacgagttaatttcaaaaaatacgctatattctactttatcgaaaacgatactgtacacattattgatgtcatactagcttcatcaagtacagtattcaaatattaatcctttgccccattctagctattaagctatactagacagaagaaattaaacaaattaagggacaataaaatgagcgataaattaattaaaattgcatacctctacgaagatttaatgaatacttacggtgactcaggcgatgttaaaatcttgagctttttgctaaagcgtgaaggctacgacactcaagtcgacaatatttcacttggcgatgacttcaatgcctttgactatgatttcgtcttcttcggcggtggtcaagactttgaacaaaccgttgtagccaaggatttaccacggcacaaagaaacacttgataaatacatcaacgatgacaaacctatgctctgcatttgtggtggttaccaactaatgggtagttactataagaccaactcaggtgtaacaattcctggcttagacattttgccacttcacactgtcttcaagagcgacaagcgaatgattggtgatacccgttacatgaccgaatggggcgaagttaaggcttttgaaaaccactctggtcaaacttacttcgacaacaaggacaagttgcatcccctcggcgacatgatcgaaggctacggcaacaacccacaagaccacgtcgaaggcctgcgctatcgcaactttattggttcatactcacatggtccactacttaaaaatactaatgtagctaatgccatcatgaaaatgattatcgcttggcaccaagaacgtgttagcgaagccgaaaaagtcacagaataaaaaagacccagtcagaatctctgactgggatttttcattatcaaattaatttaaaacacgtttagcagctgagggataaaagtaggcactgatagcctgctttctcaccccttgactaggagttgcagcgtgaacatattgtccatcaccaacataaataccaacatggtaaggagctgaggcagaaccccagaacaacaagtcgccttttttaagatgacttaatgatacgcgtttacctttagtaacttgaccataggtggttctaggtagtgtctttttagcagcctttttataaacgtattgagctaagcctgaacagtcaaaggctgaaggaccagtagccccataaacgtaactcttaccaacttgttctttagcaagttggactacggcgttacgtttttctgttttgctttgactagctgcttggacagtttgcgtttgaagtggaacattaatgaatgaaattcctgtaaaaaatactgacaaaactgtggcaaacttaactaaactacgtttaaaactcaatttatttctccttaacacttcttatctttcaatgttttctatattaccggagaaatattacagccttgttttaaaatgactactataaaattaagcaatgtaacaaaatctgctatttcttgtaaattttgcttaacttgaaaaacactataattttctatatgcttaatacattaatttaggagttttttattatgaataagatagatagttatgtacgccactttttaatactaatcgcactaattttagggctttcactcgtctcagaactgcgtgaaattattgcctatgactcatctacccttggtatcatctttttaactgctgcaattatttgtacttttgcttcaggaatcacattacaatttcataaactaaattggattacgatcattttaattctgattctttctacgattatgatcttattctggctcaaaacccacacttttggccttattgtcagcatttttatgatttacaatattattgtatttctggtttgtgctattaacctaatttttcaaaatgatgctgaatgattaaatcatatgcttaatcataggtaatacaatcccaattaccactaatccaccattaaacaaaaaacttattaatttcttttcaaaaaagtatttcttcataaaaaaagacctttctattatgaataatcaaatcttcgggctaaaattccgacaattacgaaaacaacaacatatcactttagccaaagcagcagctggtataacttcaagacagtctctaggtaactgggagactggcaaaggcgaattagcatttgagaaagttttactgctactaaaaaaaatcaacgtccagccaatagactttttagagagtagtataagtagttacctcaaacaaactacttcacaaatctctgcagcttatgttaacaaccaagttgataaattattgcattatgctaataagtatcttgacataagccatcgtaatcttacagacagagttagctttttacgagctgctgtggcatgcaattattacatggacctaacgagtatagatctaacaactagttctgataaactacggatcatctcccattttaataaaatcttgaatggagaagaaatctggaattttgaggatatttattttttaggaaatacacaaaatctgatgagtccacgtgacatttatagtttagcctattctttaaattattatcgtcaaaagcacaaaaacgataatagagaatggatcaatgccgtttataatactttgataaacgctgaatttgtacttataaaaacaaatattaaattggctactgatttagacttacttttaagacaaaagtgggatttaccagataattatgctttcgaaaaaattcgacaaaattttatgcatgaactgctaaaatatatttcaacccaagatgaaagtgcaataactcagcaacttcacattcttgaattagaacacctatctgatttaaaaactggttttgaaacagcatatgaacaagtaaataaaatatattttcaataaactctcctcctagttagtaatattatcttatttctaatattgttagcgctttttgccaatattttagcatttttctttttacaaatattagccatgatattttatattcgtaaactaattaagattttttgaggaggatataaagatgaaaaaatcaattaaattagttaatgtactttctgttagtgtactgactttaggacttgtagcacctgtaaccacagtttctgctgatactgctaattctgagaatatcgcagtaaaaacaaacaatgaatcaacacaaagtacagatacatctggcttagaaatctatgatcaatacgttcaagtaaatcctgaaaaaaatcaattcgaattatccaaattaggtgaaaaggttttaccaactactgtatcatcacagattcagagtcaattaaatgctaccaataaagaaattaaggctaataattttattattgaccctgaaaccaaagcaattgtaaaatactcaccttatattaactttgctgctagcgttagtggcgctgcgcgcttaagaagcggatgttatgttcgatggttctggtggggctttagattctactttacttcaaatgcagcagtaacttggtttagagggattttaggtggcgcttctagtggagccaccataggaaacttagtagctgctgcaacgggccatgctatggctgcaactacaatagaagcatttggtatgtacgctgatagtatgtctagagatttgtatgattataataaaaaacaccgtcgtagtaaagtatatatggatctgaatggtgtatttcaatattcatttcatacattctaaaacatttggagaaataacatggggattaaaactttagtatccgtcattttaatcattatagtcattgtactagcctgctcaccattttataaaaaatatcaattattctatttaaacaaagtaggctattgggatatcctaatccaattcctagtaattgcaggtatcaacttcttcatcggtttaaaatatggtctgggtgccctgtttttattgattgttcccgttccactagacattattttcttaatctcaatgatttattcttaccttaaaattagaaaaatgaaacgcaaatagctcttaaaaaacgaagcaaattattgcttcgttttttgattgatcttatttttcttctgtttcggcgttagattcaaagccatcgcagccacgacaaccaacactgatccgacccaatccatcggcatcattactaacccaaagaaaaggacagaaccaactgtagctgaaaatggttcaaaagcatctaataaacttacagttgatggaattacataccgcagcgcgtttgccataatttgaaatggaataatcgttccaattacaataactgccgcagtatacagccaaacttcaggcttattgggaactgcatgaaattgcggatcaattatcaacaaactgattccagcaaaaatcatcccccaacctgttactaccatactagaaacctttttaacaatgttaaccggaatcaaagtataagcagcctcaccaaaagcagacaaaacgccccaaaacagtgcaactggcgtaatggccaaatgattaaattgcccatgcgttgacaataaaaacactcctaaaaaagcacataacgccgctatgatatccaatctacgcataacttgcttgtgcgtgatagctaaatatcccaatacaaaaaatggcccaataaattgcaagattgtcgcaatcgaagcattagccacttgaatacacataaaataaaatagctgcactggcaataatccaaatatgccataggctataataaccaaaacattgtgcttatttttcaacgtagctattggtttttgctttaaaaatcctgaggcaattaataaaactgctcctgaaataatcaaccgaatttgtgttaaccacattggtgtaatcttcggactaatatcaaacaatcctttagcgaataatcctgacacaccccacattacagctgccattgctgctagaaatgtccacaatcttcgtgtttttgctggtaccatctcgttcacctttttctttctcattcacctaataattaaaccacaaaaataaggatacctactgggcatcctcaactttattgatgagtttttttaactttctttttcttaggtgaaatattcaaggccatagctgccagcacaactaaaatcgaaccaatccagtccattggggtcatcaccaaaccaaagcaaataactgaaccaacggttgcagaaaaaggctcaaaagcatctagcaaacttgccgttgatgccttgataaagcgcagcgaattagtcatcaattggaatggaatcagggttccaatcacaatcactgccaccacatctagccatatatgtggcgtattcggaatatgcggcatctgtgggtgcacaatcattaggcaaattcccgctgacagcaatccccaacctgtaacgactaaactagaaactcgcttcaacacactgattggaattaatgtattggtcgcaactccaacagctgaaagcaaaccccagaatagaacgctaggcgttaaagcaaagtgattaaaacgcccatgtgtcgccagcaatactacgccaataaaggcacagatggcagcaagcacatctattcgccgcattacttgcttatgcgttacagctaggtagcccattacaaaaaagggaccaacaaattgtaaaatcgtggcaatcgaagcattagcttgttgtactacaataaagtaaaacaattggactggtaataaaccaaaaatcccatatgcgataatcgtccacgcgtcatgcttatttttcattgtagcgattggcttttgctttaatacggcagctacaattaacaaaataatgcctgaagttaccattctaatctgtgatagccacattggtgtaatctcaggactagtattaaatagactcttagcaaatagacctgatattccccacattacgcaagctaatccagctaaaaaggcccacaggcgccgttgtttttgtgtaaccattctttttaatccccaacttttctaaaactaacatactctatcataacaaaaacgggctagcttgaactagtccgttaattttttattcatcgtttttcttaattgggtttctgctaggcattagctgcatgaatgtagcaacaataattaaaaagccaccaagcatgtccattgggccaaagtccgcatgaagcagtgaaactgacaggatcgttgcaatcagtggctcgagggctccaagcatccctaccgtacttggttcaatatactgcacactagataagtacattgtataagctaacaatgttccaccaataataatataaacaattacccaaacatcaactggtgcaagttttggcattggttgagtgaagtaaattggtaaaaaggcaatgcctgcaaccaacattgctgcgccgattactggaatcggcccatactttttgaataatttcccaggtaatactgtattaatcgcttcagaaaaagccgcaattaagccccagaaacaagcaagcggtgataaagcaagttgatcgaatctgccacctgtagccaagatgaaggttcccacaactgctaccacaattgaaatcgcatcaattcttcgtggccacatcttacttctcaatgaagaatatataattatgaaaactggcgctaaaaattgaatcaccgtcgctgtcggagcattgctgtacttgactgctacaaagtacgataattgtgagctccccattcctaagaaagcaaaaatgatcaacataatgattacttttttatcatgtagcattgccttgacttggtccaagtatttccaacaagcataaatcataagcagggcgcctgaaaaaagcaaacgcagacctacaagccaagcagtatttacattagtgctagaaaataaaaattcaaccgccgtacccgatgcaccccaaaaacaggcaccgacaacagctaaagtcaatcctttataacgctgattcacattcacacatcctttagattaatgtttttcattgtaacatgggctaaaggaaaagttcaatgcttctaaagttgatttaatctatataacgtataacctgacacgctagccaataagccgattgtaaaaagcaaccaagattctggatgaaaggcaattaaaacaagtgaaagaaagcctgctgctaaactagaattgcgttccattcgctttttgccaaaaagcagaccgcacataatgccaaacatagttagcacataaaatgagtcaactaacagtaacaaattctcaataattgctagatcacttggctttacttttacactcaaatcagtaaaaatctgagcacagccaaaaaataccatcacaaatgcagctaagatcgtgataaagctaatcgtacgaaaaactgacttcaccttttgagttggcgtttcatcgataaaggtttttaagaaaaactcgtgatctttttttgctactacagctctgcccgtcttcttgtcataccagttcaatagaccagaaccaattagcataatagcaatcacagcaaactggatgacaattaaacgcatgaaaattggaaaggcatagattaccgtcaataacaaaattactatatagatcagctctgcataaagaaagaaatgcagacgctgtttatttttgaaaatagtttggaatgtttttgaattaggatcttgcataagacttctccccactaaatcttattacgaaaactcaaccagaaatttgccccactgagaatcaagccaataacagtggctacttgcatgcttggctgcatgaaaagcaagatcagtgataaaacaacagttaaaacgctagacgcacgaattaatttacgatttccacctaaaataccgacctccacacaaaagagtaaaacaacatataggccatcaccaatcagccaaacattttcaaagagattggcaaaattaccggtaagcggcttagccaaaatgtcagtccaaagctgacgtgcaaaagcaatacttaaaccgatatttgcccaaaagagcaagaattcaaataagcgaagaaatacgtttttagtaaatctaatactagtcagtgtttcccagaatgtatcgtgttttttaatcactatccttcgatcaagaaaggcaccaattgaataataaatcagaattgcaatcccttgaaatgcaatcaaatgcataaaaactttaaagtcaaacatcaatgtgaatagtaaaactactacataagctaactcaaaatataatacacagcgactaaactttcgctcgctaagccagtgcttcaattctcttttattcatatgatcactaatattgccattcatattttcactctcttttaataattatctaattatgtaaaaattgtataatgatttcaaaattttgtctagtccttttataattgatttagtaaatatttttcgaggtaaattatgaattatcccattttaattactattttgatcttcttgctgtgctttggccgattcatttggatcattactcacgaacgtcgttccttacgcgctggagttagcttagttatcaccttatttagttttttatttttaggtgtagtcattctggttaatatcgctgaccttgatccacattacaaagactggattttgccattatttgtgattgcgctatttgctgtgatggctggaacgattatctttgcattaactttgatcattatgtttttctacgatggcattaaaatcattatcaaagaaggaaaccgctggacaaattatctttctctgggcatggggatttccattatcttcttcctatttttatatcctcttgtgggacgaattagtcatgatagctggttaaagtatccttatatttttctatggctagtcatcatctacttagtcactatcatgatgatgtatactttaacttcttggattaatttaattaattggcacatgccgcacttagactacatcgtagtgttaggcgctggcattatgggaacaaaggtaacaccacttctggcagcaagaatttcccggggaatagaaatttatcacaaaaatcctggctctaagttaatcatgtctggtggccaaggacctggtgaagacattcctgaagcagttgctatggctgaatatgctgaaaaactgggtattaataaaaacgatattattatcgaaaataaatccaaaactacccagcagaacttgcaattctcacatgcactgatgaaaccaaatagtcgcttctgtattgtaaccagctcctaccacgtgtatcgcgctctggttttagctaaacgtcaaggactcaagtgtactggttatggtgccaaaactaagtggtattttactttaaatgcttttgtgcgtgaattcattgcatatctggtaattactaagaaaatgcaattgactatcatcggttttctagcagctatcatgattgctgctgccgcatttcatttttaatttattgcgttaagttgagaaacttagcgttttttattgatttatcttttaatttttttataattatagtcaaatctatagaaagcaaggtgtaactatgaggattcgtaaaaacaacttgtcaaactgtcattagtcaggatgacgagtcctgactttttcaaaaaagcaggttacttatgtcagaaacaaaattcaataaaactcttcttagtgtcagtcatgtggatttttcctaccctaagcgcaatttattcaccgatctaaatttttctattgctaatggtgaacgtgttgctctagttgggcctaatggaattggtaaatctacactaattgacctaattcgtaagcaaatccaaccagatgatggacagattatttgtcacggtgaaattaattatgtacctcaagtcaatgatcaaactgtaattaatgactcaaagagcgctggtgaaaagcgattagctttaattgaaaatactatttggcttcctagttctcttctcttattggacgagccgacagtttacttagatgacacaaatatccagaatttactctacttactcaagaattatgatggagcaattctagtagctagccatgatctggattttatcaaccaactatgtgagagaactattattctgcagccaaataatgcagtttattacccaggaaattacgcacagtatctcgaacaaaaacaattagataaacaagccgtatacaattttaacgaaaagcgagatatattaaagcaacaaattactgaaaaagtctctactttaaagcaaaaaagtactgactataatcattttgctaaaacacaagacaatactggtcgctatccttcgcgaagccatgatcatgtccaaaaaggattaaatagtcggcttaagcgagctgaacgtgaactggctaaacttccagagaaacagcacctatatcaacatcaacttaaacttcctgaatttaaaaagtggccgactaaaatacataattactctatcaaaatagatcaattactcagtccccaaaataagactttattatctaatacacagttaaacttgcaaacagccgatattattggattaatcggccccaacggctgcggtaaaacaacattgctcaaatatttagaacactacattaatcagcagcaatctttgccaccagccagctacattggtttaaatacgactaaacaaaagaaacctgccacagtagcagatttctttcacgagactattttgagcaaaactgaagttaagcgtcttttagttaaaatggatatgtttgtcgatttgactacaagactcacggatttgagtggtggcgaatttgctaaattagcattaatcaagcagctataccttgaacaagaatctattctattacttgatgagccgactaactatcttgatccagaaagtgtgacggccttggcccaaatgctaaaacagtcgcatctcacttgtattattgcatcccacaattgcaaatttttaacccaattttgccaacaaatctataaaattaagcagcaaagactaattgaattgcactaaagcatttctcttaaacacatatttgctaagcatatcctttactatcctcatctatattaatgaagatcacatttggtgctgcagaagtttggtgcgtttctttattatatttaccaccataatactcataacgaggtttccccttgccaaaaggatctattcggcaaagaaagatcacatatgtcgctttgaattctttttccggagagccacctagcccgccatagattatttcttcctgataagcgttggcaacttccagaatgttttctcctggttcttgcgaccctacttgaatgattaacccgtatttattgcgcctcttgtctcgcgcaattacatgtacgattgctttttcatctaagacatttctatttggatcatcaagtgattttgcttcctgaatattgagttcgggaagcattctttgtactgctgtaagaagctgctcattatacttcttcataattcctgcggccatgtgatccaccattgccggtgacatttcattttctaacataaaaaaatcctcatttctaaaaatctgagagttttatccctctattacttattacgcaaaaaaacgcaaaaattttttcggaaatgaagttttttcaattttttagttttcttttctaaaaaatggactgagtagcgatacaagcaggccgtaaataaaataccagcgataaatatctgccaagtcttgattttgaatccacaaaattattgcaattactgtcagtaagccacctaaaaagattgttgaacccatatttttatcagtaaagaagctgatagcagcacctaaggtaattaacgctaccaaactataaatgacgataatcactggtcctttagtctgaacgttaacatcaagcattggtgcgttagtaaacagctgccacacgataaaaccagctaatgcaatgccacatagcaatactagtaatctaaaaacaaaagttaaagtctttttcattatttttctcctgtatgcataataatactagtataacagcaatatcgcggcatacgaaaaacgcttggatttttccaaacgcttttttactattcttttgcttgcataaattgttttctagtgatgtatttgattgatttaacgtattgccccttgtgttgaattgaaatatattggcctgatggatcgtagccgccaacctttttcaacaataaattctttttcgtcttaggattatacgccttcacattgtaataccgctgtgtgcctttatctacttgagcatagcttgtttcctgggaaatgaatggattcaatctatcagtaaaagagttatgaaatgaaaaaatgcagattactcccactactagcactagtgccgttacaaatgcggttttaatagtacttttattcataatattcaccttcatcgttcaactattgttatactaaaatagtacaccaattcagttactttaacaattgtttctagcaaaaaaacgcttgaaaaattccaagcgtctttcacctaagccaaaaatctttttatagcttcttctacactagcattcaatgattggtgcttcgttgcagcataattagccaatttttcatgtaatgaaggatcaatgcgcacattaaaattacctttaaaaggtttctctggtataactccatcttccttacagctcattagataatcatcaatggctccttgaaaatccttctccaattcatctattgtattaccttcgtaagaaataagactcttaatcccctgaaccttaccaaaaagaatcttatcctccaaagtatattcaattgaaccttcataacctttatacttcatatattgattagtttttttcatctttattcatctctttgattttatcttgaatttgtttgatttgatatggtaatagttcttttctaggatgtggtttatgaagaatgatccgatcactgccctttttaaaaataattctagatccactcgtttttcctttattatcgagttgataatctagttcatgcaatagtgttttagcatctttaaagtcaaacgttctgagactgtaaaatagtttgtgtaaggatgaatgattccttaaatttatttctttaaacattagaaaaaggagttcctttctcgtatgattggtttgaacaaaaaaaacacatacagaaagaagaactccttcatgaatgattttaccaaagattttgctcaagctctattcaatccagacaaaataaatgatttattgcgcaaagaactacaacaggctgttaataacttgctagaagctgaattgactgcctttctgggctatgatccctatgccagaaatggctggaatactggcaactctagaaatggtgcttatttccgcaaagttgatacgcaatttggcccaattgaagtgcaagtgcctcgggatcgcaacggtcaatttcatcagcacacgctgcctgactacaagcagcactcggatatcttggaaagcatgattatcaagctttactccaagggcgtgaccaccagggaaatagccgatctaattgaaaagatgtatggcagccattacagtccagctcaggtatcaaatatttccaagcagatgattccaaaggttgaggcttaccacaaacgcaagctaagcgacaagtttttctgcgtctatttggatgcgacataccttcctttgcgccgagaaacatttgagcgtgaagcagtctatattgccattggcatcaagcctaatgggcacaaggaggtcattgactactgcattgcgcctagcgagaacattgaagtctggacagatatgcttcaaaacatgaaatcccgaggcttaaagcaagttgagctttttctttctgatggtgttgttggcatgaaaacagccttggccaggacttatcctaaagctcattttcaacgctgtttggttcatgtcatgcgcaatatctgcgctaaagtacgcgtcgacgatcgtgaaaagatcatgaacgaattcaaacaggtgcatcaacagacaaacaaagaagaagccacagctgtcctgcatgacttctataccaaatggggcaaggtttacagccatgttatcagaagcttgaaagacatagaaccagatctgctggtcttttataactatcccaagcagatcagagcttcaatttattcgactaacatgattgaatcatttaacaatgtgatcaagcgcaaagctaagcctaaggcagagtttccaactgaacagtcgcttgatgcatttattggcatccaggcaatgagctacaatgaccgttatttcaatcgaattcataaaggctttggtcaggttcaggacaccttagaatcctactttgattaaataaataattaaaaaatcaatttacgagaaagaactatttacacaaaagatttgacagtttcaacgttcttggatgactatataactttattaatagcttttctaatttactcacgttatcctcacttaagtatataatataatatatcatttgtaactaaatttgcaactaagacaaattatacctaattcgctaaattcacgctactaaaaaagcgcttggaaaattccaaacgcttcttttgtttaatcatctagacctaacttcttaaagatatcatcaacatgacgcaaatgatagtgataatcaaatgcatcatcaatatcttccttggataggtaattcataatttcactgttttcaaccaatggcttaaactgcttttgctcattccatgatttagcagttagcttctgtaccatatcataagctttttcacgagatagacctgcttcatcgatcaacttaagcaacactcgttgagagtaaattaatccatatgtacgatccatattcttaagcatcgtttcagggaatacatctaagttagtcaaaattcgattgaagcggtgcaacatatagtcgacgccaatagtcgtatcaggcaagataactcgttcggcacttgaatgagaaatatcacgttcatgccataacgctacatcctcgtatgctgtaacgacatgtccacgcattactcgagccattccacagaggttttcagatccgatcgggttacgtttgtgtggcattgcagatgatcccttttggccagcgcggaaatgttcctcaacttcatgaatttcactgcgctgcaagccacgaatttctgtcgcccaattttcaatactagtagcaatcaatgctaatgtcgcaatgtattctgcatgcaaatcacgaggcaatacttgactagtaattggctgttgtgtcaaacctaattgcttcattacgctagtttcaactgcaggtggaacattagcaaaagtaccaacagcacccgaaattttgccagattcaacgccttttgcggcatgttcaaatcgttcaatatcacgattaatttctgcgtaccagcgagcaatcttgagaccaaatgtagttggttcagcctgaacgccatgtgtacgtcccatttctactgtgtacttatactttttagccttttctgcaatagttgcttttaattcgtgcagatcttttctgataatctcatcagcttgtttaagtaagtagccttgagcagtatcaaccacatcagttgaagtcaaaccaaagtgcacccattttttctcagggccaaggctttcagacacagttctagtaaaagcaaccacgtcatggtgggttacttgctcaagctcagccacacgctctgcagtaaagctggcattcttagcaatcttctccgcatctgcttctggcacttcaccgagttctgcccaagcctttgttgcggcaatttctacttcaagccaagctgcatatttattttcgtctgtccaaattttccccatttctgggcgagcataacgttcaagcataaattacatttcccatggattcttcaaaacaatagtttgttcacgatctggaccaactgaaacagttaccaaaggaacgccaaccaactctgaaacgcggttcaagaatttcttagcattttctggaagagcgtcccaagtcttaacttgagtaatatcttcatcccaagctggaagttcttcatatacaggcttacatctgtataattccttcaaacttgctggataataatcaatcttttcaccatcaagttcatatgcagtacaaatcttgatcttgtcaaaacctgaaaatacatcaagcaagttcaagctaaggccattgataccagcaacacgctttgagtgacgcaatgcaacggagtcaaaccaaccaacacgacgtggacgaccagtaacagtaccatattcatgagcagtttcacgaatacggtcaccaacttcatcaagcaattcagttgggaaaggacctgcaccaacacgagtagtgtaagccttgcagacaccaattacagtatcaagacgattagcacctataccaatacctgaacaaataccaccagaaatagtattagatgaggttacaaatggataagtaccttcatcaatatcaagcatcacaccttgcgcaccttcaaataaaactttcttattttggtcaagtgcatcattcactaagacagaagtatcagttacatacttcttcattctttgaccatattcatagtatttatcaaaaatgtcttcaaatttaagtgctggcttaccataaaccttagtaaataattcattctttacttcaaggttagcacgcaatttttcttcaaaggtgtctttttcaagcaaatcacaaacgcggattccaattcttgaagccttgtccatgtaagttggtccaataccattcttagtagtaccaatcttgttagcccccttagcttcttcttgatattcatcttgcttaatatcataaggcataatgatgtgggcacgattagaaattctcaagccactagtatcaatgccactcttttcaagattttctaattcgccaaacattacttctggattgattacgacaccattaccaataactgtattgtccttggctgcaaaaataccagaaggaattaaacgcatcttgaaagtttgaccattaatatcaatagtatgacctgcgttgttaccaccatttgaacgaactgcaactgcagcatccttactcaaaaagtcagtaatctttcccttaccttcatcgccccattggcttcctacgactgcgactgctgtcatttaaaattcacctcataaaaatctctataaatattacgtatgctagtctagcaattaatttacaaataatcaatataaaatccgaattattttatttttaaattatttcatagttcgatttttatattgacaaacacaaattattcccatatagtatgtctcggtcaacaaacaagattaaagggagcagttttaaaatgagtaactactttagtatggaagcctttgactatgatgatatccaacttgtacctaataagggtattatcaaaagccgtcgtgatgcagataccagtgtcaaattcggaaaccgaacatttaaaataccggttgttcctgccaatatggaaagtgtcattgatgataaccttgctatttggctagcccaaaacgattattattacgtaatgcatcgttttgaacccgaaaagaggatttccttcatcaaaatgatgcatcaaaaaggattattcgcatctatttcagttggcattaaagacagtgaatatgattttattgatgaattagtcaaggaaaaccttaaaccagaatatattactattgatgtagctcatggtcactccgtttacgtgattaagatgatcaagtatattaaggaaaaattacctgattcatttttaacagcgggcaatattgctacgccagaagccgtacgtgaactcgaaaatgcaggcgccgatgcaaccaaagttggtgtgggacctggtaaagcatgtattaccaaattgaagactggctttggtactggtggttggcaattagccgcattaagaatgtgcagtaaatctgcttctaagccattaattgccgacggtgggattcgtcataacggcgatatcgctaagtcaattcgttttggcgctaccatggttatgattggttcaatgctggccggtcatgaagaatcacctggtaatgtaatcaaaattaatggtaaaacttacaagcaatactggggctcagcctctgaggttcaaaaaggtgcttacaaaaatgtagaaggtaagcaaatgttagtgccataccgtggctcaattaaggatactttaaaagaaatgaaggaagacttgcagtcatccatctcatacgctggtggtcgcgatcttaattccattaagttagtcgactacgtaatcgttaaagacaatatttttgatggtgataagtaattttaataaaatttttgcatttttattattttcctgttaagaatattacgataatatagtattatctatcttttttcgatagaataatataagtcgagttattgtagggtagtcaataactcggctttttttgattattttttaaaaacgattggacagagttttaaattgtgttatactagttgtcgttgatgaatgcgcccttagcgcaactggatagagtgtctgactacgaatcagaaggttgaaggttcaaatccttcagggcgcacttaaaaacgggaaatggctcagtttggtagagcacctggtttgggaccagggggtcgcaggttcgaatcctgttttcccgataagttagccgcacttcattgaagtgcggtttttttgtgtaaaaaaataagtattccctcggaaatacttatcatgctatgcccctttagtagctcgtctaaagataatctgtgtatctgaatctacatatttcaataacggtaaatcgtaatccttaacctgggccaaaacatttactttctcattgcatggcaaatcgcgtttagtaatctcgatttcgccttcataacgcggatacaaatgattatcaatcgtcacgctgccagttggtctagcataaatattatcttgcggctctgttgacaaaaacatcttttttctgctttcctttaagcgaactacgtcacgcgccacatctggacgattatgccaatcattaccaaacaattctggtatatcagtatctaaatgcagtgtaattgcaccctgtttttgataattagtaatcgattcaattgcatccctcgtaagttgcggatctcccacaaaaatgtgatcgcaatcataatctttcaattctaagatcgcagctaatgggttttcatatcgctgcttctccaacgttggcaatcctgcaaaaattggtccacgcaatttgccatttcctgaaataaaggctgctgttttcaaaccatattgcttaagccactcattcttcttttgcatccagtgtgcatcaagacctgtttcaggacgtgggtagaagttatgtcctgctgttaatttttcaaaatttgcattgctataacgcagatcatcaatattttgttgcgtaataatgctggcatttagaactatcggcatttctttggacaacttggcaataatatcagtagaaaatccatgatctactctaagaccagttagactcaaacttttaatttgctcaacactattgacattaatacccaaatcttgcagatcatctgccgtgacatctgcaataattttcaagtctagtttttgacaccaattagttaagtccgccagccgatttaaaatcgtctcactatcagtatcaggtacagctagctgagtaaaaacgcaggtaaatccactattgcgcatcgtcagcaaataattgtaattctcggacgtcaaatcgtgtcctagataaacagaaaatcctaacattcttattcctctaaaattaattaatttcttttattatctatagcttaaacgctttcttaaatatcttactacattttttgcttgcttttttctaaaaaataatgttaaatacatataaacaaattaaaaagcgatgaaaaagacgagtaaataatctaattctttccagtgaattagtgctagtgtgaaactaatagaccctggattattgaaaaacacttttagcagctcactgaaacaataattcttagagtaggttgagacgtctccggtacgttaccacgccggtggagcatgatagtgcttcatgagtcggtctattaaaatatagacaatgtgggtggtaccgcggaaaaaagcctttcgtccctgtttttttagggagcgaagggctttttctttgctctaagtacattagaaagaggacttatattatgacacttattttacctaaagattatcacccaacattaactgtgcgcgacactgaagctgcgattgtatttattcgtgaaaccttccaagataaattggcagaaattctcggtttacaaagaatgtcagctccaatgtttgtcgaaaaaaagaccggcttaaacgacaacttaaatggtgttgagcgtcctgttgcctttgacatgaaggcaatgcctaaagaagatactatcgaagtagttcactcattggctaaatggaagagattggctttgaaacgctatggtttcggaatgcatgaaggactttacaccaacatgaacgccatccgccgggacgaagatcttgataacttccactccatctatgttgaccaatgggactgggaaaagattattagtaaacaagaacgcaacaccgacacacttgaagttactgtgatgaacatttttaaggcaattaaggcaactgaaaagctggttgctgcacgctacccaggctctacttatcgcctagctgatcacgtttcatttattactactcaagaattagaagatcgctggcctgatctttctccagaagagcgtgaagataagattgctaaagaagaaaaagccgtctttattatgaaaattggtgacaagttaaagcgtagtggtgaaccacacgatggccgtgcaccagactacgatgattggcaattaaacggtgacttagtcttctggtatgaaccgcttaacagtaagattgaaatctcttcaatggggatccgtgttagcgaagaaagtttgcgtgaacaattgaaaaaagctcactgtgaagaacgtgagaaattaccattccaccaaatgcttttgaagggtgaattaccttattcaatcggcggcggaatcggtcaatctcgtctctgtatgttgctgttaggtaaggctcacattggtgaagtacaagcttctatttggccagaagatatggttgaggcttgtgaagctgacgatattaagttgctgtaattttaagatttttttacataccaaaaagtgtctgggaaaaaaatagcttccagatgaataaaaacgatcaagatttccttttttaagaatcttgatcgtttttttgttctctttaaaatttttaacaataaaaatcggcccttcagccaccttctttgacaatatttgttcaaattcatcatcataaaggcaattccgatatcggtttcgaccttctctttacctcgcaggtgcgttctgcgcatgccaaatacgttcttcaaatgtccgaaaactggctctacatcatattttctcatgccatagatgtgtctgccttcttcgctttggagaacttcttttgctttttcttttaaatattgccagttaggattatagcgaacttggcgctggcggccgctagctgttttagccaattgttccaattctggcgttagctggaactcgtctgcctcataaaccttaaaatcacggacctgaccagtagaacgatccttgcgctggctgtaatatttgaaattgaatctgacgccatgatgatcaatgtaataatcatctttttcattgtagtaccagttgattagcttagttggatcattcttatactttttggtctgttctttttcatacatagtgtagggaataaagtacttcttgtctggatatttttcctccagcatcgaataattgtattcactgccatagccagcatcggcgacgattttgtcaaacttgtccaacacggtcatttgatccaaaaccggctccaaagttttgaaatctgtcggattaggaaagatggcataatcaactacatattgatcggtcgtgactgcttgaatattgtagccaggctttaattgaccatttttcatgtggtcttccttcatatgcataaaggtggcgtcatgatctgttttggaataactgttgcgtccggcaaagatctcttcggcttcttcatatttttgcattcttggcacataatcttttcttagccggtgcagaatcttttttagtccacgtcgcttggcttttcgaggtgaaccgccaggaatggctttgttttcctgctcaatctctttagtcagcttgttaatttctgcttcagtttcttgagctaattcctttagcccctgactagtttgaactttttctttttccatttctttgactacttctttagtaatcaattcatcataaagttcaactgcctggcctttcagcttttcatgatacttttcaaccgctttgcgccagacaaatgtatagcggttagcatcagcttcaatcttagtaccatcgataaaagcagcaccttcattgattaagccttcatcttctaacaggttagtgaagtagataaagctctttttaatcagttcattggcatggctgcttgatctaaaattattgatagtatgatatgaaatcttttgctggtcagccaagatcatcattggcagattttcttccagcatcaactcaatctttctgccagaaaaaactcttctggagtaagcaaaaagcagtattttgagcatcatggctggatgataggctgggcggcccgttttagcagtcttgcctactaaaacatcttctggaattgaatctacaaaccagctgatgacattagccaaatgattggccggaatggcaaaatctagattaagtgttaaagcagtttgacctgtgatataattcttgtacatgttagtttccaccttttttattttgtgatgatttaataatatcaaggctggagctaaaagtatacaaaaagagcgttgaaacaaaaattcaacgttcttttttcatgatctgagacttagttttttcccagacactttttctattgattttatttccgttctcttctagaaatccaagccataatcaatggcaacaatacaaagccaaagaccatcatcgcaatggcataccagttaacaccgataacttgccctgctgcgtttactacaccaaattgtgccttccagttatattcaactaacaagaagatcacaatcacaccagataaaattggcacaataacatcagtcataacgctcttattagcctttaagatatcttcttttgccttaccacggtaaaattgaataactgctagaggtaccacgatgaaacctaagaatctaaccatcgcgctcaaagtaatcaagttgaccatattgtattcaaaggccatcggaatcaaaattgccaagccaacagagataaagaaagttctaattgggaagttattcttagttctcttagttaaagcttgtgacatctgaccctcacgagccatagcttccagaatacgtggagcattaaagctggaagctacgttgatcccaaacattgaaaccaaggcaccaaccaagattacatcacgtaagatttcattattaaaaatagccgcaatcgctacaacttgcttagttgtcattaaagcacgtggattaagtaccatcgctaccgctacaacgccgatatagacaaccgcaataattaagattgccaatggaattgctcgtggcaagttcttttcagggttcttcatatcttctgaaccagaagctactgattcaaagccggtaaaggcatagaaggctgaaacaattgacatgacaaaggtagttgtagttaaagttggcacaattttctgaccattctgagtcaattgatctacttgccctaggttgcttgatgcaccagtagtaattaacaaaactactccagcaataataattaataccaatgcagccaacttaccgatagtagctaaattcattacatacttaactactttttgaccaaacaagttgatcacggtaataattgccatcaagatcaaaaagccaattgtgacatttattgccttattgggatttccgccaaaaattgaaatagttgacttaattaccccaacagccattacgccccaagctacactggctgagaagtaacgcagaactcccatataaaagccaatttttttaccaaaagcggccttggaataagcataggcagcaccagatttagtgacatactttgaagctgccgcaaacgaaatggccagaatcgctgcaaaaattgccgcaattaaatatacaactaaagctttactaccggcttgctgtaccacactaccaggtgttaaaaaaatacctgaaccaataatggcattaatcgctaacagcacaattgaccaaaagcctaatttatctcctgttttttcagtcatctatttgcttccttactttgcattatcaacaacaaacttaaataagttattcataaacgctacatcggaattacggtgcaacatttcagggtgccactgcacggcaatgacattaccttgtttattttctagcccttcaaccacaccatcaggagctgttgccactgcttttaaatctggtgcaacgtctttaattaattgatggtggaaagaattaacgcgaaattcagttttgcccaaaatttcagccaatttactatcagcttccacttccatactatgagtaggcaaagttggcgtatgaccttgcatgtgtttcaaagtaagttcttttctgtatgaaagatcttggtaaagcgtaccgccatgagccacattaataatttgagcaccacgacaaatgccaagtaccggaataccattttcttctgctaactttaacaagcgcatatcaaaatgatcgcgttcaggccaagtagcaccaatcttttgcattggctcctcaccataaaaacgtggatcaacatcatgcccaccagataagatcaagccttgaacatgattaagctgttcacgaatcacctcatcattttcagtaaatggaataatgtaaggcacaccgccattttgaactactgaatctacatagtcttcgttcacataactacgatggtatcctgggaaaattcctctatcgtcaataattacagaacctgagataccgataattggttttgtcatttatgctcctccttctgcttactttttgtatgtaatattatagagaaatttatgcaaaaagtacaattaaaaaattgcattgttgtctataatttttgcatatctttaaatatagtaaaaaacagcaagccttatttttagctcactgttttatgctatttataccaaattccaaaaaggatttccattacatgctaaatatgtttctagccactgtttaaaagagaaatcaaaatattgttcctctattccaggatacgttagataggactgtttttgattgtagcgatctaaattaatgcccatttctccctcgtctcttaaccaaagtataggtagataattaggtgttttaactaactgatttaagacatactcaatagtgtaaattctacaccttgctccacctaattcgatgccttgaaaagaatcaatgaataattctgcaccgttagcctgtatccaaaactctatcaaatcatttgggacagatatgcctgacaacctatttattttattttcagctactggcggatttaatttaaatttacagtaatagacgccaccaaaaccaaatattggtacgtcgacactgcattttttactaatcaaatttatattatctattatattatccattttaataattaataaaccatttagttataagcttatgtgcttcaattggtactggcattaagttgtcaaagtcattatttccaccataaattctaggtcttatatgatgaacttgattttcagcccaatactcttttgattgattgccataacgctcactaaactcttttatatagtaatatctatccatcgtagtccatactggtgaagaaggaagtctagaccaagtagtattgattggtgtttctgcatcttttttagagacaggatcaacatattcaggaaaattttgaccaattttattttgtaaataaatagaactaagtgaaattggataagtagcgctatttccattatagcctaccattccccatgctcctccaacagcaaaaaatgttgtagcagctggaaatacagcagaccctaacaaaccagtagtaatattgccttcttttacaattggactagctgtatttgtagtaattgggccggacaatgatggttcactatagaattgcaattgaactgaaattgcagcaggagctggaccagttattgaatcaatataaaaattgattttaaattgtccatctacatactcttgtgaagtatgaaatttaacaactgtatctggaatctctgccaaaaaagtatatgcagagtaatggctacttgttgcattaaaattattatgaatttttacagttccattttttaaaatagggacatctttttttacattttcattctttaacttatcttgagctaaagaatgaaaattttgttcattagctattttagcaacattcttatttacatcatttagcgagtcagcctttgcatttgtattgatagctataaagcacacgatagtggctaaaaaagcaaataactttctgtatttcatgtttctttcctcattatctataatttttaacacaattataaggatctttctattattctaccatacaactctatcacataagcaagtgctcccacactgtagcatcagatgctactgggatttacactctagattgatgtatacgaagaacacaattacaatcagaataacatgaaatactactatagcgacaatttaaaatatacagtaaaatctttaaactgtatttcttattctaacccttgttcaaagcgatactgccgtaatacatattccttgaaaaacggtaaagtaaaggccacttcaccataattagtagatttgataacttgatcatctaacaagcgtctacgatagttagcaacaaaattgcttggacggtttaacctttcatgaatttctttaattgaaacacaatgttttgggctctgagccatagctaaaacaaattttcggtcttgctttgacaaactactaagtactttggtataaacattttgctttagcaccaataagtactctgatttaatacattctaaagtgttttgatctattaccttactttttttagcagctttcaaaactaaataacctagcaactgaaaggcatatgaatagcccattgtcatcaacgccattttttcaagaatttttttcgacacttgataacctgattctttaaaaactttactatagctagcttcaacctgtgagagattcaatgctgataaagctattcgctttccacgtagtaagaatgaagttatattttcgtttttcaattcagagatattttcagaaagaccagctatcattaaggctataggataaccctgccgatttaataattgataacatcttgcaaaatctttcaactcctgacatagttttacttcgtctaaggtaatcaacactttaacgtcattttttcttacttcatcaaacatgttcgttaaaatatcttgatatgttaacttactaacgtctgtagaaagcgataatccaaaattagagaaatttagtccttcaatagatttaaatgatttttttagttttgaatctgcattcagatataagctattaataaaagaaggcaacaacttcatccccatggccaaattaacaacaatccaatctggatatgcactaatctttctgtccattgctgtcaaaaagacagttttgcctattccacgcattccataaacaatcgaaattgtatatgaactatttaaattctctattccttgagacacatcagcaattagtttttttcgctgcaaatacactgctggaattcggccaaagctaggattaaacggattatccatattttgtccccaatcattttcttatcaaaaaagcagcaggcttcttacctactactcaattttatttatctttttgatgcttaaccacataaatcagtgccgcaataatcaacactgctgcaccaaccgctactgaaatttgcgtctccggattaatgaacatgaagacaacaattactaccagcataatcaaagcaaagtaatttgaatatggataaagcggcaatttaaacgggtgattctccatcaagtgtggattctttcgtctaaagcgtaactctgctagcaggatcacaaaccaagctaccatccctggcaaaacagatgaactatagacaataacaaaaacattagccaatgatttattcaaaaattgggctaacacattaagcataaaaccaacgaaaattccactggtaattccaatgatcgcatgactaggcacgattctcttagatacgtgaccaaaagtcttaggtgcttcaccttcgtgtgccaatttatacaacattcgacttgatgaataaattcctgagtttgcaccggacaaagctgcagtcaaaactacaaagttaattactgaagctgccgcggtaattcccaccttggcaaaggtcgttacaaacggtgagccaatgctatctaatttattccatggataaattgtgacaatcacaaaaattgccccaacataaaagatcaaaatccgccacaatactgacttcacgcttttaacaatggccttatgcggatcagatacttcaccggctgaaatcccaattagctcaattccttcataagaaccaacaataatggccattgagaaaaagaagcccttgagaccaccagtgaagaagccgccatgactccacaggttagaaaagcctactggatgaccgccattaccaaagccaaatagaattaccgcaaagccaagtaaaatcattaagataatcgttacaaccttgatcatggcaaaccagaattccaaggttgcataagctttcgcactagctaagttagccaccagcaaaaataaaataataattacgccggcaacccaatcagaggtgcctttccaccaaaagcgcaaatactctgttgttgccaccacctcagaaattccgacaacaatgtattgaaacacgtttgcccattcggctaaatagccggcaattggatgcacatgctctgaagcatagtctgcaaaagaaccagtacctggatcaacataaagcatctcacctaatgcccgcattacgatatacaaaataaccccaacaaaaatataagctagcagtactgaaggaccggtccacttaatggttgagctagcccccatgaatagtccaacaccaattgctcctccaagtgagatcatttccatctgtccggctgtcatcgaccgctttaattcaggtgctttcttcgccatttccaactccctttctttagcatctgtaaaaatttcctaggaaatatatctattctcatttatctttaatcactataccttatcattttttcgaacaaaactgtagctgatcgctaaaaagattgcaaataaaatcgaaataatcaaagccagctgcgttgatttgataaagaataataagattaaaataccaatgtaaaaggcaagcataagccagctagttactgggtagcccggcattttaaagctgcctaaattctgcttattctgtttgcgataaacaatatgtgctgccataatcatgatccaaacaatcacaaaacaaatcgttgaaacagttgagacaacggagaatatttctgctggcattaaatagtttaaggcaactactacaaataaaattaatgaagaggtcatcaaagcgttcattggaattgcttttttggtcaattcacctagtcttttaggtgcatggccgttacgtgctaatgaataaagtgatcgactagttgaaaagattgcactattagtcgctgacatagctgcagtcaaaacgacaaaatttaaaatccctgcagccgctgtaacaccgatgccggtaaagacctggacaaagggacttgaagtagttgtaatgtgattccatggataaacagacataattgccaacattgagcccacataaaaaaggccgattctaactggcaaagtgttaattgccttaggaatatccttttgcggattagctgtttcactagcagtttgacctacaatttctaccccaacaaaggcaaaaacaaccatttgaaatgataaaagaaagccccaaatcccagttgggaaaaagccaccatgattaactaaattagttagtgaaacataaccgccctttatatgcgtatgaagtaacaacattacagcaccggtaatgattaagactacaattgccattaccttaatcattgagaaccaactttccagttcaccaaataatccgacatttaccatgttaatcaacatcaataagatcacaattactaaagggccaacccattgcggtagccacggaaaccagtatcttaaataaattcctgtcgcagtcaaatcagccatagctaaactaagccagcaagcccagtacatccagcccgctacaaattcggcacgcttacctaaatattttttgattgactctaaaaatgaatgactatcaggatcggctaaaataagctctcctaaagcacgcatcataaaaaaggtgataatccctacgattaagtacgacaaaataattgaagggccagcactatgaatggctgaaccagaacctaagaataggccagtaccaatggctccccctattgcaatcattgttacgtgacgactcttaagcccgcgttttaatctcggcttctcatccataattactcacaccttcctcaaaataaaaaatggagcggcatgttttttaaatgaaacatgttgctccatcaagtttgctttttttgaattatatagtcttataccaattcatgcaattattttttatctaaaaaagatattcccttaggaatatcttcattattagtaaactttaaattggttcaacggccagtaacgtactttaactacgccaacgatactactacgcttaatggttccgatataacggctatccttagaaacgctccggtgatcacccattacgaaatatgttcctttcggaatgcgcccagtatcctgcacatatttaatctgcgctctagtaaagtattgctggtaagtccgcgcccgcatcagtgactgcatagtaaaattctgagtctcagaataaaatgtatctgagccattatcaattaacttcgttccttgtttcaaccaaggttgagcaatctttttattattaatgtagatttgattatttttgctgacgattttttcaccaggcaaaccaataacacgcttaatgtacaaagcacctggttcatctggtgctttaacaatcactacttcaccacgcttgatttgcgcatgacgctcagcgattagccgatcaccattttgaaaagtaggttgcatcgaaagacctgatactgtatcgttgctcaagacgaagtggaaaagcagcagataggcaccgatcaaaataacccagataattaagatatctaggaaaaacttaccccatgattctttttcttcttttttctcagccattatttttctccatttatctttttccacagtttacaactttatggagaaattgccaaattacaaaaaagaggtatttcctcggaaatacctcttttattattaatgactattaattagtcttcttttttgtcttcagttttagcttcgtctgaaacttctaccgttacacccttcttagcaagaacatgagacatcttcttcaagtaaatgttaatgatcttgcccatgtcttgttcagtaagtgagttgaatggaacgattgcgtccaaacggttcaagaattcaggtctgaagtagttttcaagggctgagattaacttgtcttggtcaaccttgccatcttcaagcaacttgtctgagaagccggcgtttgaagtcataatcaagatagtatccttgaatgaaacagttctaccttgtgcgtcagtcaaacgaccgtcatccataatttgcaataatgcgttgaagacttgtgggttagccttttcaatttcatcaaataaaattaatgagtatggttggtgacgaaccttttcagttaattgaccaccttcaccgtagccaacatagccaggtgctgaaccgatcaacttgttaactgccatttcgtcttggtattcactcatgtccaaacggattaagtgttccttgttaccaaataattgaattgccaattgtttagcaagttcagtcttaccaacaccagtaggtccagtgagtaagaatgaaccagtaggtctgtcgctgtctttgaaaatttgcttacgagcaatagcgtcagtaattacatcgatagctctgtcttgatcaataacattcttcttaagtttcttagctaagtccaagttcttttgagcttcatcagcgtgaagttcactcattgggatcttagtcttttgttcaataattgcgtagatgtctttttcagttacttctggagtattcttagaatctacattcttaagttgtttctcaagttcagcaatcttactcttaatttctgaagccttgtcgtaatcctctgccttagcagcttcagtcttcttagcttcaagagctgagatttggttctttaagctcttttcatcagttgattgtacaagcaatgccttcttagcaccagcttcatccatcaagtcgatagccttgtctggtaagtaacggccttgaatgtatctttctgataattcaacagctaatttaagactgtcgtcactgtattttacgtggtggtagtcttcgtacttcttctttaagccttccaaaatcttaacagctacatcagtagatggttctggaacttgaacagcttggaatctacgtgataaagctggatctttttcaattctttggaattcactagtagtagtagcaccaattaacttcaattgaccacttgccaaagctggcttcaagatgttagctgcatccccattgttgttttctgaatcagtagaaccagcaccaacgatgttgtgaatttcatcgatgaataaaacaatgttaggatcgctcttggccttgtcgataaccttctttaatctttcttcaaagctaccacgaagacttgaaccagcaaccatgtcattaatatttactgaaatgatatgcatgttagccattttagctggtacattacctgaagcaattctttcagctaaaccttctacaatagaagtcttaccaacaccagcaggtccgattaaaacaggattattcttcttacgtcttgaaagaatttcaattacgttatcaatctgttcgtcacgaccaattactgggtcaaatttattgttcttagcttcctcaactaagtcaacaccaattggcttttcattgggttgttgtgggttctgttgaattgtttgtggtgcagcacccatgctgctggagtaattaattggaattgaacctgaactgcctttgctatttcttctgctaccaaagtcgtcattaaagaatgagctattcaattcgttaaataagttatcaaaatcattgtcaaagtatgccatatgtgcaacactccctatctcaaatttacgtctttagcactctagcttatcgagtgctaactcattacatttaatagtatagcaggttatccacagactgcaagctaaaaaacaaaagttttacacattttcctttatttttgtgatttttatttaaaaaagcactacaaatgctgcaatataaacatttgtagtgcttcacaaattataaagaatttcttaagatgggcaaaaattgatgattattttgcttaaaactgttgaattttaaggaagttttccacagataagaataagtttattaccataaactatttctgcctacctctattattgcccttttgcttgtccagtattttgcggttcgctcaactttctcggcccaagaaaatactgtttaattactttgattacctgcttattctgaggtaaatccgagtgatccgcttctacacccgttactgtcattgcagtatagctcttgacttgattctgaaaaatatattttccggctgctacgctagcttctggtacaattccatcagactcataattttttccaccagataaggaataaacaatcaagtttttcggtagtttatctttgttcttgataaagttttctagcatttgcgttttatgattaatatttttttcaccaaaattatatggcgttcctagcgtcatcagacgtttgattttaatttcatcagaatagtaacagtagtaatgttctaaccaataggtccagatcaagccaccgttagaatgcccaaaggctttaaaattattaaacttatagctctctgataaggcataaaaggcttgatcaaaccagctggcttgcttcttaatattgctataaccatcgtgattattttcaaaaccgacaataatgaaaggttcgttgtcgtttttattaattttgcctgaatatgacagcgttccattcgttgaaactttaattttaagcacgctatgcttagtcggtgtgttctgatttagctgcttcactaattggttaaaacgttcagtcgttgcactagaacctggaatcataattactggtgacaaaagcgatttgcgtctttcagctctagcgtggttatcagccttcatccaagaataacccggaatagccaaagctactaataagactaagacgattgccaaccatttaaaattaggattttgaactaaattaatcatttttttcttcataatcctttagtcccctttcaagtcgcaaacctaatttcatagttggaataaacattattatatccaaaatgaataacaaaatagaaaataccaagttgctccaatcaccattggaaccaaagaaagagaccaaaattcctggtgtcccacttaaaacggggtaagcacaaggttgaattaaatggcaaaaaattgctccagcggctagtagaatattaataattggaataatcacaatcgccggcagtaacaatggatttaaaataatcggcatcccgaccatcatgcctccagttgagcccaaagctgctggaagcaggttaaccttggcaatattttcactatccttatttttactataaattaggataattacaatcatcgctaaaacaatactcgcaccacccatttctgcataaggataaaacaaagaactacccaaatacttatatggtacattccaagcactcccatgttttaaggcaaaatttaagttagctgctgctgaaatactattagaagtagttgacaaagaagctagaggataacctattcccatccagctaagtaaaaagactgggatagtcagtaaagctattaacaaaatattatttgattcctgtatttgagtaactaggcctttaaaagtactagaattcaagaatttgatttgaaattcataaattataatccccagaactatcccacaaaaaattgcaaatattgtcgggataaacgcattccaggctctttccttaattctagcggcatgttcaaaatcgactggcttgtgttcctttcctagccaatgaaaaatttgccctacaccatagccaattaacaaggccagcaagacagcattaatttttaaaacactggaagaaaatggtgaatgatcgctggcattattagctaaattattggcataagcacaaaacatgataacgatgacagccgtcatcccggccatggttgaatctttacggtataaacgcgcagtataacgtgccgcaaaataagccgcataaataccaaataagccgaaggttacccgaaccatcccccgactgacaaatgctcccgcataccaaaaacgatctggcaaagtgatatcaaaattaaaaatattgtaaataaaactatcgggcgaaaaaacggcatctctgaacaacttaaaatatgccccaattaccgcgatcggcatcagcataaccaacgttcgctgaaaaattctaaagattgccaatcttcttagtttaagaaagatatttgtgattctgtttaccatggtattttcctttacctatctattctaaatatgattgaataaagttaattaaaacaattattaattatacatctatactagaaagctgattatgatggcttacattaacttaaaaaataatactaaaatttaccaatctggtgacacaaccatctatgccaataagaacattactttttctatcgataaaggagaactagtcattattctcggctcatcaggagctgggaaatctactttgcttaatattttaggcggaatggaaccaaatacaagtggcgatgtaattgtagcgggaaaaaatattgcaaaatataacgctaaagaattaactacctatcggcgcaacgacgttggctttgtttttcaattttataatttgattcccaacttaacagcaaaagaaaacgttgaattagctgctcaaattgtccctgatgcgatgagcgccgatgatgccttgcagtatgttgacctagggcagcgagaaaacaattttcccgctcaactatcaggcggtgagcagcaacgtgtggcaattgcccgagccatcgctaaaaagccagccttacttttgtgcgatgagcccaccggtgcccttgactataaaacaggcaaacgaatcttaaaaattttgcaaaatatgagccggcaaaatggctcgacggtcttgattgtaactcataacgccgctattgccccaattgctgataaggtcatccgtattcacgatagaagtattcaaaaagtccagcataatctacatcccgctgatattagtacaattgaatggtaggtgggcgacatgcaaaaaactattctatggaaagatgcttggcaagcaatcacccattcacttgaccgttacattgccattattctattaattgcactggggacttttgcctttacaggtttaaaaatggctggtcctgatatgcgagcaacaggggcagaattttttgccaaacataacttagctgacgtcactgtcacttcaaactatggcattaattcaactgatcgccttactattcagaatttaccggaagtaaaagaagctacttttggctattttcaagatgttaaaattaaaaatcaacctgatacgctccgcatcttttctcaatcagataatctttcaagttatgaattgattaaaggtcattttcctaagaataaaacagagattgcactgtcatatttattgcagaaaaaatatcgcttggggcaaaacattacttttaataaacctggcattttaaaaaataagacttacaagattgttggcttcgtcaaagctagtgagttcttagataaaaatccaatcggtcaaaccaacattggcagtggccatttaactggaattgcggttgctaatcataacgccttcgccgcaccagtttatcaaattgcccgaatcattttcaaaaataccgccaatttaagtccctttggcatagcttaccgcaaccgtgtttataacgatcaaaccaaattgcaaactgctttaaaccaaaatcgagccgacaaatatgacaaatatcgggccatgtatcaaaagcaatatcgacaagctgcagctaaacaattacttaaacgtggcatcgtagttaacccggcgcaaatcaaagtaccacagaacaagcttaaaattgcttatcctaactacgtaatcaacagccgtgaagaaagtcagggttatgcttcttatcgagcagattctgaacgagttgaagttttggctaatgtctttcctgttttcttgtttgctgtagcggctttggtcagcttaactacaatgatgcgttttgttgaagaagaacggactaatattggtacgctaaaagcactaggctatggtaatggagcaattgccattaagttcttgctctatagcacctcagctgcaattttaggtgttattctgggggctagcttaggttacacctttttgcctaacttaatcatcaaggcctatttagctagctcaaccttaggaactgattaccagctgaattttgcttggggaccactattaatttcattgacgattgcactacttgcaacaaccgtcgtttcaatgattactttagctcaaactctgcgtgaacagccttcagctttacttttacctaaaccacctaaaaatggttcacgtattttactagaatatattccatttttatggaagcacatgagcttttcagctaaggtaacagcccgcaatattttccgttataagagcagaatgctgatgaccatcctaggcgttgctggttgtactggattactagtaatgggatttggtattcgtgattcactacacggaattggcaatattcaatattctgaagtacaaaaaaatgatgtcatcgctttgaaaaaccgccatgttaacacgactgagcgacaaaaattaaacaaaatttttaccagccatgatgttacgcaaactactgctgtacaatatcaacaattgactaaacaccttgatagcactggagcaactgaaaatgtaatgctaattgcgccacaatcaactaaaaactttagcaaatctatcaatttgcaagaacgtcaaagcaagaaaaaacttgttttgtcaaataatggtgtagtcatttcagaaaaattagctactatcttgcacgctcataaaggttcaacaatttccttaaaaaatgaacatgggaaactacttaagttcaaagttagtggaatctgcgaaatgtatctcggtcactatatctttatgagcccagctgaatatgccaaagaaactggcaaaaaatttactactaatgcctatttagtaaccatggccaaacattccccaggaaatatcagccatattagtcaaaaaatgatcaaaacaggcgcaatcgaaacggttgtctcaacttcatcaaatagaaaattgctgagcagtttcactggtagtctaaatgaagtcattctaatcctaattttaatttcagggatgttggccttagtagtcatctataacttaactaatatcaatgtcgctgaaagaattcgcgaattatcgaccatcaaagtgctaggattttacgataatgaaacaacgatgtacatttatcgcgaaacaatcatcttatcggcactaggaattatcgtaggctttggctttggttggtggctacaccactttattatcactagtttgccaccagatgtcgcgatgttcgatccgaatatgtacccgttgaacttcgtcttctctgcgctaattcccgctattatcaccgctattttagcaattgttgtccatcacaagatcaagcgaatcaacatactagatgccttgtcctccattgattaagcgctgttatgctataataatcactatagaaaagggtggaaaaaacatgccaagaaagcactttgaattaaacagtgatgttaataaattaatcgaaaaatatgatgaaattaataatgttgatttcaataagttagttaacaaggccttaagattctaccttgttaatcaaatgaactacaaagatgttcaagacgccctgaataaagctgataacgaagcttctaagtatattgatgaagcaatgcgttccagcatgggtgatattaatcgaaattattagaacataactaatcatggaaaaagccatctgttttgacagcaggtggcttttagtattcattacaagataatttattataaaaacaactaattgataatttctttactcaaaatgcttataccgataatatcgataacctatctttttaccaaaaatcgtctccgaagttttcatccaattagccagcaaaacataaatgcctaaaaagactaaaccgaagattgctaaataaccaaaactaccaacacggcctaagtcgttgaaacgatagccaaataaaatttggtaaacaaagagcaggataatgtaaatctcgtttgaaacaatgatcggcaacaaactccccatcttaacgccatatgtcttattaagcttgtgataactgagccaaattaccagtaagaatgaaatatcagttgaaagaattgcaccatccccattcatgaacatagtcatcggtacttgcaaaattatttttactaagacaccttcaaccatatagatcacagccagtttgttcatgttcaaagctaaaagcagtgttaatgaattcatcaccaaaccagcaaacaaactttgaacaatattttcaaccaaataatacgcacctaaactatcgtgtgagaacaagaccgtataaattggagaagccgcaaaagcaccaagtgcaacaaccggaagcaagacaaataatagtagtctatagttctctaaaagcagctttctaatgctttcttgactatcattagccttatacttaagccctgctaaaagcggcagactagtctcagaaacggctgtcgcaagtgaaataatcaccgtggtaatcttgcttggattagccgagaaaattgtgtacaagtaactaacatagcttttactcatatgactgaagctaatcaggatttgtttaaacaaaagttgatcaactaattgcgtaacagtaatgaacgatcccagcaaaacaaacggaattgaggcataccataagttaagcaaactacgagaaacattattaagtgctctgggctcgctattttcaattaattctcggtaatgtccccactgcttgcgcatatatgcaaaaagatacaggtaactagctatagcaccaacacaggcgccaaacacactgaaataaaccgccgttacgtaatcatgatggaagacttcaataatcaacaaagtagccagcaaaataaacaaaattcgagcaaattgttcccataattgggaaatcccatatggcttcatatcattatttccctgaaaccaacctcgaaccatactcattgatggcagaattactacggctggcactaatactcgaatagaaattgttgcactagccactgaatccactggactatttttggcaatcattggtgccgtcacataaagcaaaataccacacgctattcccatgaccagcataatagcgaagcctaatttggtaatgtacaaactgtctttatatctattttgcgaatttaattgcgatacttcccgggcaataactgaaggaagtcctgccgtcccaattgataaaaacagcgcatacggcgtatatgacgaattgaacagcgcctgtgcgtttaattggttgtggtagcttcccagcataattagccaaggaatcaaataaacaaccccgagaattctagatacaatgctaccaaacgatagccaaaatgaaccggataggatttttttattcaatagaatagcctcaaatctacgttagtttctcattgtgccttcttattatacgtggattttataactttgtgggaaatatgtaccaactagttacccttttttaacaaatttttcggctctaataatacaaatcagttacattatttactatattgttacccagcctttaattttacgttagaccccttgacctaaccttctttaattattatccttaaaatgtttctgttaaaggtcataattagacaaaaataataatgtattaagaatattcatcgggggaattaagttgtcattcaagaaaaagattatcactaaattagcttatgttgctatgctttcaactactggcgttgccgcagctgcaatcgtgcaaccacaagcacatgttcaagcttctaccacttcagttgctgctcgctcactcggaatcgatgttgctagttaccaaagtgctgatctttcagctcacgctaaaagcggtgctaagtttgctgttgttaaagtaagtgaaggtaccagctacagaaatcctaaggctagtgctcaaatcgctagtgcccgcgctaagaatatgatgccaatgggctaccactttgctacattttctgctaatagcgctgctgctaaaaatgaagccaactacgcaatcgcatcagctaaggctgttggtcttggtgctggctcataccttgcatgtgactatgagtcaggtgacggcaacaatatctatggtggtaagaatcctactgctaatgcaattaatgccttcatgagcaaggttaaagctgctggttacaagccacttctttacgctagttcatcagttttaagaaacaacattaacactaactctgttgttaacaaattccctaactcattatgggttgctgcatacgctgtttcaggtcgagtagacaatcctaactttgactacttcccatcaatgaagggtgtttcaatttggcaatttactgacaactggcgtggtcttaacgttgacggtaacattaacgttttacctcttacttcatcaggtagcgctgtttctcaagcacctaagaaggctcgcgtattaaagaagaaggctcatgtatataacaaggctggtcaccgtacaggcaagactattaagaagggcacttctatcactacccatggcaagaagaaaactatcaatggtaagaaatactacaagattgccaagaatcaatacattagatcagctaacctttactaaaaaggcaaaataagtcatcaaaaaatgcaccaggtagaaattacctgatgcattttattttatccaattttttacttggcgaattgttcaccagctaagttacggtagaagttagccttagcttgacggtaatatgggttaacccacaataaaccgatcccgcaggaaataataccaagtagccaccagccgatgaaacttaaatcaaaaataaacaagtccatcttatggccatccatcaacttacggctggcactgatagcttctgtggcagtcggctcatgaccactatctagcatgtcacgcaagatatatggtgtcactgcatatgaataagccttgatcagccctggaataatcagtaaccaagtccacaaaataagaaaaatttcatataaaatataagttaaaaagttactcttaaagtttctggtaaatggactaaagatacctgaaagaacattttccttagtaccactatctctaaaatgcaagatagtataaattacgccccatgtgattaagccaattgcaactgaaactaccaaagtaatcagccatgcaaaaggattaactcttactttatctaggtacatcaattcagcattgttaccgaagcggcggacaataccgtacacgatatcttcgcccttttcaaaaaagttttcgatatcggtcaaaatataaacgattagccagccaacaaatgacagcaaaactgcccagccccagttaccacgtaactggtctctagcttgttcttttaattcttttcttgtagtagccattttctctcctcctcacttttctaatcatgagtattgtcgcctaaaatcagggcagaatcaattaaaagcacatcaaaaaagcctaattccaccaacatcggaactaggctcacacagtgttgaccgccactctgaccacatatagaagataacattttcgctaccggagaaaatgactactaatagcgacggtacatgatagattttagcattcaactacctaaaagacaagcgaaaagacgtgttgaattagcggaatggataccaaaatttacggataaaaaagacgaggtctaaacctcgtcttcttcattactaaaattcaagcatcatcgtcattgcacgattgatcttctttttaatctttttaaactcaccagaagcagtatgattatcctgcaaaatgatcatgttctggccatctttagttgcccgcataaaggtataatacccttcaccagcaccattagcagctttataatgctttaaattataaagtccaccattataatagctaggagcctgacccttgaacagaacttttctactcttgttagtcaaaatcttaccagcaagaatatactgcatggtcttagctaaatctgcgttagacattacgattgaaccagcacccagctcattgtgagcatccttaacggctttagcatggttcactttgacatattcaccctcacgcatttcatagcctggtacccaatgactagccaataacttagccttgtctgaccacaagaactcactatgggttagcttcagtggcttgatatatgtgtcatggaacaattgctcgtatgactttttctcaagcttggacaagattccacaaaggaaaatatagtttactgaagtatagtgccacttacctaatttgctagcatcaaacacagtatattgtgcatcatgcttgatgttcgcttcatcagagataaactcaggcgtacctaattgttgaccagctttcaaatccagccctgatgtcatatcaattaagttgctaatcttgactgaactagcaccatctacatttgggtagaattttgaaagtttatcgctaagcttcaactttcctttctctacctcatgcatcaccattgcagctgtcattgacttttgaactgaattgatcaaatagctagtgtcaggtttattgtccgtcgcataattaagcaaaactttgccatgatttattactaaaactgagcctttaacgcccacatggtcaatagcctggcgcactattccgcttttaaacggtctttattgcttaaatcaactcgtttaacgttatccttgttttgccacttcttggagtagaagtagttagacatatcatagtcataacgcttattaggttccttcatgaatggacgaacagcttgatcaactgcaacccagcctttccagcctaggtgaatagtatcttgcataaagtacttttcattgcctcgtcttgaaagatctgcaatattttcaaagccttgactggttaactggtgttccatcttagcaacagactcttggtacatcttgctagataaaccagtgtacttcatccacttgccattaattggtgggatgataaatagcacattagtgtgttgcttagcaaactgctccaacatcaattggagatcaccatattctactgaatgtacatagtcaaaatcacgctgactacccttcaagcgtttcaataccttctttggtaaacgtgttctaaagaaggtattatcaatacctaagttgtttgagttagtgtgtatagcagcttgctctgctgcaaccttattcaaagcagctacagaatacttgttaggtaaaaccttagctctcttttgaatcttatttacacgatcacgcaattggaatgagctgaagaaattatcttcgttacgcaacattcgacgacgattttgtaaataaaatttttggaagctagtcaacttcttgccttgagcaatttgcttaaggctattcttgatctcgccctttacatttggcatttccaacagacgtttagctgcataacgatcagttttattattcttggcactaagcaagaaattacatgcttgcaatggtgaataatacaatgcaaaggcattaggatcttgaccccgcttagtaaaccattgtggtgaaatgatcacaacagccttcttgtttctaagctgcttagctgttccttgcatccccaagaactgagccaaagattgactacccggtccacctaataagaatggacggtagtttctatgatacttttccgcaattacactagggtgaagtgggtcgaatcttgacaactcacttgaaccatagaatggcacgtagccatcttcaaaagcttcctgcttcattgtgctgcccttgaagacagttgtgttttgtgaagctgcagcctcgtaaatcgtttgcttagaaaaagttctttcccaaggaataaggaaaacaactaacaaaaggataaaagcgcaaagaactgggccaaagatttgccacagccggcgtttattactcattttctaagctttccacctttgccacaatcttgtttggagtgtcccattcttcacggttaaattctgaaacaggaacatcaatatcaaacttttcttgcaagttcaaaagcatttgtacacttgccattgagtccatcaaaccattgtcaaagatgttttcatccatttggtctgataaatcttcaccagttaagtcatttaaaatatctaatacgccttgttttgtatccataattaatacctctcaaaaaacaactcaatacttattctacttccagccgaaccacagttgacttaggaaccctgagaaaatcaagaaactgaaacatactacattgaaggttaagaaaatggcgaaccatttagtaaacttgttagatggaatttgcttcttatgctttctcttgaatctaagccacatatcgttgatacaaatagctgaagcatggaagataccataaacaatataataccacgttaagccatgccagaaacccatgattaagaacaacaggaagtaagaaacttgtgataatctaattcgattcttaaacattttcttcttcattgcaaagaaagtgaatcgcatgtagatgtaatcacggaaccagaatgataaagtaatgtgccaacggttccaaaaatccttaatgttcttagaaataaatggcttgttaaagttcattggtgtatgaattcccataaagtatgagattgatacagcaaacaatgagtaacctgcaaagtcaaagaacaggtacatactgtggcaatacatgtaagctacaagccaccatgatagcttcaagccgccatttgcattaccaacggctaaagcagcagcactgatctttggtaacaaataagtgccaaagaaccaaccaatcacaaatttgtataaaaagccttggaataagtatctaacagcatactgcatatctgtaatgtatgcatcacgcgtaggtaccttatcataatcttttttaaatctgcggtaacgatcaataggacctgacgaaatagttgggaagaaaagcaagaatcttgcgtaagtaacaggatctactttcttaattgccccatcacgcatttccataataacttgtactgtcttaaaggttacgtatgagattcccaagaaaccaatgacaaagccaattgagttatcaggaaaagcggtcaaatatttaactgcggctaatggaataattgccaaaatcacagccaaactaaagatccaagtcttatttttaccgtggtgacgataatactgataagcaaaggttaaggcaaattcgtaaaccaaccagattaataggttaaccccttgctcccagtgatcaccatcaaaaatcaagaacaagaaaacaattgaaaaaattgcttcatatgtcttgagtcgatgaccgtaatatagcccaatgataattggaattaaagcgatcatcaaatagatgaaatattgcggattagaataaggctgtaagttaatgaaattaaaattcactacttattaacctccttaattaccgccttaatatctaccttaccattttgtgaaataggtaatgcatcttggtagatgtaacgctgtggaatcatgtaaggcattatattcttagctaagtcttcacgaatcatcttagttaaagcagcttcagaatactgacgacgaacgccttcttttaattcgatttcggcaacgatctgcttaacagtgtggtccttattgtacttaggagcagcaacgccataacggacaagcttgttcttagttaagtagaaattgatttcttcaagttcgattctgtaaccattgaacttgatttggaagtcaattcgaccgcgataaaatagcatatcgccatcaaagaaaccagcatccccactccggtagctacgatactcagcaccatcttcatggaaaaaggcagcttcggtcttttcaggattgttcatatatcctttagaaacactaggaccactaatgataatttcaccttcgccaggcttatcacccttagaagtatcaattgtaatcttagtgtcttcttttaccttaccgattggcaaacggtcatactttttaagaacttcatcagtaatttcaacttgagtaacagcaactgttgtttcagttggaccataggtgttgaaaatatgactatctgggaacttcttcttaagcatctcagcttcactgtgtggcaattcttcaccacagaacaagaaatgacttaagtctggatggtgttctgcatcaaaagtcttgtccaagaagcacatctgtgcaaatgacggagttgatacccaaacattgaactgcatctttggcaaagtttggaataatttaccaaagttttgagtaacatcatgaggcaaaactaccaacttaccagcagaaacaagtgctggataaagactcattactgacaaatcaaatgagtaaggtgcttgtgccaagaaacttggatgttctggcaaattaaagtctgacaactcccagttaacgaaactaagcaaattgtcgtgactaatttgtacacccttaggtttaccagttgtacctgaagtaaagataatgtagtagttctcatcaccttcaacgaagttcttctcgtcaacttcaaaattgtcgtcttcaacttcgctagccttaagaaccttaacatcagttaaatcaacttctggtaacggatcaatttccaaaactagtggtgacttagaaacgtcttgaatcatcgttaaacgttctgcgttagaatagctagcaattggaatataagcgtgacctgacttaacacaaccaagaaaactagcaatcatttcaaaagtttgtccgccccaaatcataattggagcatgctctggaatatctaagctagcaattttatgtgcccacgcatttgaacgctttttaaggtcaccatatgtattagtttcaccgagatagtcgtaaacaacacgatctggttcgtttgcggcgatctcatcaattttcttaataacatcttgaatcatgtgatagcacctaccttaaaattcattataaatgaagtgaacagatgttagtccactatattcatataaatagataagagccatcaggattccgaaataaacaattgttttcaaaacaaacataccaatacgtctgcctcgagaatcaaccttcgtctttttattcattttttctcctttaggtaatcttacttttgcctttgccctatattactacaaatagtggcaacaaacgcactaacggcttatattttaacaaatttaaactttttcttaaatcttcagttatttgtttcaaattgcgaatgcgttttctttactgttgtctcttgcaatcccgataagcaaaaaataatggaataaagataactattgccacaaaaatcaaagcaaagatcattaagcgccatacattctgtggtttagtccacattttactctttgccgtcgccaacaaaaatgccgcaaataaagcaataacaattacttcaaccaggcaaaaaattaaatgagtattttgccagagatataagtaggttgttgccggaaataaacaaaaccaccctgaaaagcgtaaaagaaagatttcttttttacgataatctactttcattatagtttcctttcctcattaactgccaaataacgcattaatattcaccgacaaaatccggtccataactacaatttctggtctggcgtagatcttagagcctgattcaaacacacatagtagttgtcccttataagcggtaatttgctctaaatatggcggcatggtaattaccagttctgcattcttttcgtctaaagcatttaaagctgaagttggaaaaacgtagagcttggaatcaccactaccataagattggctcaaaaaaattttattttggtaaattgcaattccttgaatttgcttatccattgaagtttcgccagttggatcggaccattgcagcgttccggtaacagatttaacttcattattagtaattgagccacgatttttaccactacgcgctatagtgtaagccgcaacttttcctcgaccatacatgttaaaaaagccaacaaacaattgaccatcataatatgtaacggtcgatgctttttcaactgcaggaatggcaatttgatatttatacttaattggtatttggctgccctctttataggcccttaattctgccattgaaaatgctgctagcgctgaagatttgcccattgagccagttatccagatatttttggctactggatcataagcaatcccacctaggtgtggccgaccaggtatttgaatcgttttaagatatttgcctgtcttcttatctaagacataaacaaccgaagcatgctcatgttcaccatcataagcagttagcaaaatatacttacctgcaaccgtaatcccctgtggtgtcattgcagttgctgtattgacctttttagttttaaaatcataacttttagtagcaactaatcccggcaaaacaaagtcttttccatcccacgtccgcggtggtacataattggcaactttattaataaaaggatatttttcacgcaatgctttttggtaattggcaaaattatgccaagcaggactagtgcttgtcccatccttagcaattttttcttttggccgttgacggatcatctcctgcttctgccaccattggtaaccgaaatagcctcctgcaccaatccctgcaagcaaaagcagtactagcaggaagcgcaaaattcttttaccaatttttttcaaaaaattactcccttctgtttaggaattgtccctattatgcaattcattataacgaaaaaacaattactttttgtttttaactccttgctataagctttatttactaaaaagataaatttttttgcaaaaaagtgctttcgtcacacttttttcacaaattaaggttatactagtaaatgtagtgaggaagaataatcctctactacaactcaacttttttgtttttcattcatactcctccaagtaaataatgaaaataaaaagaattgacttactccaattagtcaatttcatatctatccctttcggctcacgtgcgttgcgtgagcttttcttataccttaacttattctcaagcaaatctttaccttttcataataaattgaacacttttgcttcacatttacccagtattatataaaccgtagcaagatggtagaaacttgctacaatactcccacttttttatttcattcttactcctccaaagtagatgaaactaataaggtccgcaaaaacttgcgggccttttcctttttcagcacttttttctgtataattaaggtagaaatgaggtgccgctatgttttcaccatcaatcaaacatttaatagaagaaaaatctggttcatttttaatccctgctagccgaattgcctttgtccaagcagacaatcctctttatcatgcctttttgattttgactaaggttaaatattcaaaaattccagttttagataaagaaaaacgagtcgttggcctgcttagtttggaaatgattacggacaagatgctgacgactgatgagatctccactgcccctttagataaattaaaggtcgaagatgtaatgcaaactaagtttgataaaataaacttcgttgaaaccaccctagaaacgcaactgcatctgttaatcaataatgctttcttgcccgttgttgatgatcgcggcgtgtttcagggactacttactagacgcgaatggattaaggcatttaactatgtagttcacacttatgacaaacactacgaaacaaaacgaataaaataacctccaagcagcctttaaggctgctttttttaactccaacatttattgagcaaaaatgtgtccagaccaataaagaatgttagaattaagcggtagacagatatgtttgtattttggggagggcaattatgaaaaatttaaaacgtcaatggaagtttattgtcgttttgattgctggtgcagttggattaattagccaatttgcattgcattcaaagagcctattctcaatcgggaatcttcaatttccagttcatgccatcattattgatatcattggtatcttgatggcaatttctttactattggaaattttccacgattggaagacaggccgttacggcgtagacatcctggctgttatcgctgttgtttctaccatattgattggtgatgtatgggctgaatggatgattttggtaatgatgaccggtggtgaaacgctggaagattacgcaactggtcaagccaacaaggaattacgtgccttgcttgataaaacgccacgtatcgccaacaagttagttgacgggaagatcaccgaagttaaggttgatgacctgcaggtcggtgatactgttttgatcaagccaggtcaacaagttcctgtcgatggtcaaatcgttaagggcacttcaagcttcgaccaatcttcattaactggtgaatcagttcctgtgaccaagaaccctggcgacgaattaatgtccggttcagtgaacgatgatgtagcggtagagatgaaggtaactaaggctgctaaggactcagaatatcagtctattgttgcgttagttaagtcttcacaagctcaacctgctaagttcgttaagatggctgaccgttacgccattccgtttaccgttatatctttaattattggtggtgtcgcttgggctgtgtctggggatgcaactcgctttgcggaagttatggttgttgcttctccatgtccactgttgatcgctgctcctgttgctttggtatcagggatgagttcaatgtcagctcaccatattattgttaagtctggtccaaccctagagaagttggctcgcgctaagacctttgcttttgataagactggtactttgactgaaaaccaattgatcgttgaccaagtcgttactgatgacaaatcatttgatcaaaaagaattgcaaagcttagctgccagtgttgaacaacagtcaagtcacgttatcgctagttctctagttaaggctactgacaaggatttaattcatcccgtaactaaccttaaggaaactaccgctcaaggtgttgaaggtgatgttgatggcaaacacgttaaagttggtaagttatcctttgttgcgccaggtcatgaaaaattaaacgtcacttcaactgctgtttacgtttcagttgacggtaagtttgctggttacatcactttgaaagataagatgcgtccagagagtcctaagactattgaacgtcttcgtcgtcaaggtgcagaagatatcatgatgcttaccggtgaccacaagcaagtcgcagaaaaggttgccaaagaagccggcattactgatgtccgctcagaacttttgccatcacaaaagattcaagctattaaagatgtgccaaagcacctacgtcctgtcgttataactggtgatggtgttaacgatgcacctagtctgaccgctgctgatgttggtattgctatgggtgctaagggtgctactgctgccagtgaaagtgccgatgctgttatcatggttaacgatatttctaaagttaacgatgcagtcgctatttctaaacacacaatgaaggttgctaatatcgatgttttaactgcaattggtgtcgttattatcattgaattgattgccttcactggtgttatcccagccttctggggcgctattttgcaagaagtagtcgacatgattacgatcagcttaggtttacttgctaagactaagccaagtgataagcaatttggtttggaagaaaaatagattagatgtgaagaagctccagaatcgatttggttctggagccttttttcatacataattatgcgtagcactgcaccagttcaatttgcatctaagttaaaaaactattaagattaaactcaactaaataatttttagtggttgggtttttatcacaataaaaactttcaagattcgcttctttgggtcaggaagcacttgaaagttttttgtttttttacagaaggggaaaatatgcattttttaggacaacttatcttaatcctcttaactacagttttgctggggcaattattcgcccgcttcaatatgcctgcagttattggacaactattatcaggaattttactgggaccagctatcttaaattgggttaagccaaatgatatcatcagtctattctccgagttcggggttattctgctgatgttcttagctgggcttgagagcgatctagatttattaaaaaaatacttcaagctaagctttactgtcgccacagtcggcgttatcctacccgttgttttcatgggcttagccagttacttctttggcatgcgccctcttgaagcactctttatcgggattgtctttgcagcaactagcgtttctatctccgttgtggtgctgcaagaagcacaccaactgcacacccgtgccggcacagccattttaggtgctgccgtagttgacgatatcttagccgtggttgttctgagtctattcactacattcagtcatgaaggtggcaagagcggcttaactaataactttttgcttaatatcttgattgaagtagtttacttcgtagttgtttggctgatttttaaatttgttgcgccatactttatgaaagcttctgaaaaaatcgacgttgactattccgtcgttatcggttcattggttttagccttaaccatggcttgggccgctgattttgttggtctttcagctgttgttggtgcatttttcggtggtttagcaattcgtcaaacaccacaatacaaagaagttcactcctctgtttccgcaatcggctactctgtcttcatccccgtcttcttcgctgatatcggtctttcaatgacttttgccagctttttcaaggatatctggttcattatcgttatgaccgttttagctattttatcaaaattctgggccggaaaatactccagcgaaatctttggcttcaataagaatgaaggcaatatcgtcggtgctggaatggtatcacgtggtgaagttgcactgattgtagcgcaaatcggaattaaccaccatctcttccctgaggatatttattcaagtctgatcctagtaattatcgttacaacagttatttcaccatttattttgaattactttattaaaaagagtcaaaatagtacggaatttatgtagaaaaagtctagcattcgctagattttttaatagtttaattttacaagtggcttatcataaacgcaattgtgtctacatggtaaaatcaatagtgagaggtgagaaatatgttacaaactccaaacaatattagagctgttaccgctcgtgacctgcgcaataattttaagaaaattgctgatgatattaatgactatgatactaccgttatagtagctcgtcccaaagataaaaatgttgtgattatttctcaaaaagaatatgattcatggcaagaaacttcatatcttctaggaactaaagctaaccgcgatgcattagctgaagctaaacaatcatttgaaaaccaagatcaacgaaataaagttttaaccccagaagaattcgaggctttaactaaagatgacgaagcttaaccttaattttaactacaatgcctggaatgaatatcttgaatggaaaaaagaggataagaagacttcccaaaagattgataattttattaaagaatgccaacgccatccttttactggaaaagggaaacctgagccattaaaagcgaatttaagtggtgcatggtctcgacaaagtaatcataaagatcgcatggtttattcagttaccacaacagaattacaaatatggcagttaaaataccattattccaaatgaaaaagctctttcgagcttttttgtttaacccaattttcctaaatcgattacttggtcatacttctgcaactcatttgattcatagtggtgaattacttcaataaaggtaaggtttgagtttaacaagtaattatgaatttgatctgatgtcttcttatcaagggatgcattaatttcatctagtagcaaaatcgatctatcggccaaaattgcccgtgctagttctattctagctagctgtcccccagacaattgatccgcattatcacccaaggaatagtcccagcccttttcagcaataatttgatccaaacctaatttttggcacacctcgctcaccttttcccgggaaatatttgcacctaaagttaaattaaaccacaaggtatcggcaaaaattactggggactggctagcataagcgaataaatctgtaaacgagcctggcttttgctttttgtcgttaagcaatatttccttggcatgaccatgctttccggttaataggaattgtaataacgttgatttacctacaccagatggtccaataactgcaactttttgaccttttacaactgcaaagttaatttgattagctaattccttgccttttctagtaagatccagatcttctatttgcaaatttgcaaaattataattggtctctttcttttcaaccttgcccttggcaatatatttttctgccttagcgacaattttcttagttgttgataatttgtttcgatcttctaaaatagtcaaaattggattaagaaatgaatttgacagttgaacgattgcaaataaggcacctaaagtagtttgacccttaaccaccatgtaaattcccactaagaatggggttaagaacgtaaataaactagcaatcaagttaatccaagaattagtatctagattgagtaagttcattttacgcaaagcatcttctaattgattgatcaaaacttgatttttcttaaccgcattatcgcgcttgttgtataaatttaatgttgtgctaccagccagaaagtttttaatatgactaacatatttatcattagcagttgtccaattttctgctgcagtttgaatcttcttttgaaataaattagaaaccagcatcggcaaacatgaaccgattaaaaataataatgtaactaaccaattaacacataaagcataccctagcgcaaaaacaatcatataggcctgcatcattatttcaatttcagcatcaaaacgattagtttccagcagcttaaaatctgtagtcaaaaagcctaagctagcagtattttcttcgctagtctgacccagcatcccctttaaaatgccagctcgcagcgtcgtattagtctcttgaatagcacttgtttttaaccgattgaaaatcagcgaagcaataaaagtcgcaataaacgccccaataacaataactagaaattgtgctaaatcgccaaaccttctttgcgtaccaacattggtcaatgtctgtaccatatatgcaaaaatgatttgttgtgtactagcaatcaagcctaaaatagttaacataatgaattttgcatgtgaagaatatttgtaaatcattttttgtcctcctgtattttacttgaggctagtatcgcaggataatgacgaaaaatgttagaaatttacagatctgcaaatcgaggtaaaacattatgttcaaatatggttcaatttacaaacaattgcgcaaagatcaagaaatcactcaaactgaagcctgcaagggtatttgttcaatctctaagttatcacgctgggaaaataatcaggtagaagttgagtttagcaccgccattgcattactcaggcgcatcaacattacgcttgacgaattcacgcattacgctgcaatgaaaacagaatttacattgccagacgacattataacggccattaaagacaatgatacaaaggtactcgaaaaatttgttcaggagcagctaaatcattatcacgccaacaaaaatattctcgaactcaaaaacatcattcttgtctgcaatcaattatttctcatgactggtaaaaactatctaacacctgcagacattaatcgaatcggttcatacctgcttcacaacaccgtttggtctaaatacaatatcttgctttttgctaactcaccgtttttgctaaattctaaaatcggctatcaaattgctctgcgaattattcacaattttcaccctacagaaagtttaaacgaaaatactactattttcatgggcggtttatctgatacagttattgccttagttttcaaaaagaagctagattacgctcaaaaaattcttaatgaattaaaaaagataggacttcccttctatctcatgttctttagttcaacattgacccttttacaaaaaattatcgactactgccacactctcaacgcacagcctgtattggcaatgattgatgccatagttcagctaaattgcatggaagttgctaaaaaatggcttgagatttttaaagacgtacaacaaatctggccagaaaaagaaaattaaaaaccgtaaaagtaatttactttcacggcttttgacatggtattcattatgcaagcttacaaatttttagcttttaattaatccttaacaacgtctttggtgttcaaccattgactcttgttgatcttaacgatcttcttgccagcagctttcttaacatccttagcggtgtaagttgaacccattgaaaccttttggctagtcttgtgaccttgtgcgtccaaaacattaactttttggttcttagtgtcctttacagcaacaaagatcttgtcaccctttttaattgcaggatcagttggcatagtttcggcaacacctaactttggagcagtaaaactagctgcttgactaactgaagcaccaacacccattaaactcattgaagcaactgcgattgaaacaactttaactaaattctttgaaactaacataatgaatacctctaatttctatatcacttaatttgttggaactttttgttccctcattccttacgtctttattgtataacatatgttattaattacaaggggtttatcgaattttttaaaaataattcagtcgtctcaaagtattgctataataacgattgcggggattttttgtccaaaagcattaaaaaagtgtctgagaaaccgttctttcccaaacacttttttaagcagctgctacttcgtttgaattttgagtcacttttctagtttttaaactgacaaaaatcgctacaattagtgttattacctggattactaataatgtaaccaaagcaacagtaacattgaatgaaccagaaattgtggttaatactgttgtcataattggagcaacagccattaagattgtatttaataagccaacagttgaagccaagattttatgatcaactgatgttactagccattgctccattttaactgaagcaactcctgcaatagctgccaagaaaaacattgttatcataattacgtaagtatttcctaggaaaatgcttgttgtagtaacaatacttaaactggcagaaataattactaaactaaaaactgttaattttttgaataattgtggtccaaacattgaacccaatgcaaagcctgcgccaataaccacaccaaacaaagcaatagtaaagctataagtgccgattagcatagttgaacgatgagctgcaagtacaattgttgtcaatggagtaattgtatctaaagctccatttaataatgcgattactaataccacagtcaataatcctgattgtttcttcacttgggtcaatgaagttttcattgtttggaaaaagttttgatcattaacttcctttttttcaagtggcttctgatccttctgatgttttaagccaacactggcaaataacaaacctgctaacaagaaagtacctgcattaacaaaggctaaagttgagtatgacattactagcaaaagtgctgaaccaatgaattgagcacccatactaataatttgatttacgccgccattaaagcctactgcattcccgtattcttttttaccaacaatatcaacaattaatggtgcaaccaagccacctgaatatgaaccaatagtatctgataagaaattcacaacaacgatgattaaaaccaaattccactgtgacattttagtgataaacaataatcctactaaaccatataagataaatcggacaaatgctgctaaaaagatattgcgaaactttttcttagtcttatcagcaaggtaaccaccaaagatctcgaataattttggaactgattcagaaattgcaattaatgaaagtgctaatgagtagttttgtaatttgctagcataagtcatgaaagccaagtagaaaagaatatcgcctgcgcctgaaagaaaactagctactgaaaatcttctaaagtctgcgtttttaagaaatacgttcataaatcttaccccctttttctttgtttcgtttgttgttgaaattataataaagtgaaaaagaaattaattttaaaaatggcgtattcgacattcggaggataaacctatgacaattggtgaattactcaaagaaaaaagactagcagaaaacaaaactcaaaaagcatgggttggtcatattatcagtacttcttattatgctaaagttgaaaagaatattcatagaattacagcagaggatttattagccattcttaaacataatgatctttcaattactgactttttcgaagaattagcagacaaaaaggatgaactaaaagcacaagtaaactcgctaaataaaacagtaattgatgctgtttatcattctgatgtttccaaagttaatgaagtcattcaaattattaaaaaaatggatctaccgactaagcaaaaacaagaacttatcttaatcaataaggggtttatcgaaactatcaaaaatgatctaagtgacaattatcagccagataaaaacatcgttcaacaactaaaagacaaaatttttagtattcctaattttaatagattcaaacttgaactctatactaatttcatgcaattttatgattatacaactaatattatgatcaccaaacaagtgatccataaaatagatcagtttaagagcgataaagagttattagcaatcgctggtattctattcaatctcctttcacaattagtcgaagaacatcattatcaagaaactgcaccatttatagcagctagtgagcatttaccctttttaccagacttatactttcctcaaaccggaatctcattgctaaaataccttattagttatcattttaataaaaaaacagcagacttagctaaagctgagatgattgcacaaacttatcaaattactggtctagaagactttggtaaaggtgcacaagaaattattaatgaagttaaagaggactagctttaagctaatcctcttgtttcaatctctaaataaaacctaacgcgttatagcacatgtgcaccaaaattgaatagcgcaaatctttggttgacatatagacccaagctaaaaccatgcctaagacccaatatactaagatatacttacttaatgccggatcatgcatatagccaaataaaaatccgcttgcaacaatacctagccacttatttctagtatttttcttagtgaaaaagatattgaaaaacatccctctaaagatatgttcctcacaaaatggcgcgatgaaaactactaggatcctaaataaacctgcattgtattccgctattttattcaagctttcctggttctttgaaacgccgccaccaactagattaagcatcacaatcgaacctactacaatcagtacaaaaccgatcatcgctattccgattctgcgccagtcccagtgtggtgtttcatcaaagccccaatcattttcttcttttaattgcctgcgataaatataggaaattgcaaacaaaactattaccgtagcaagcgccgtaacgaagacgcgatattgcgccaaatcaaatcgctgaggtctaaagtaaagtacttctaattcagaataaattaccaaagccaacacagcccctgcaatatttcccaggtaatgtccaaatctcttcatttttcattcacaccttgattctttcaactagtaatcattgtttctattataatgtaaataagaaaaaatacctaaggaggagtatctatctatgcttaatcagatcatcgcttttttggggagacgcggtgagttcttctacatttcagtctttatgttactgatattttttgcctttttaatctcttggcttatcgaaccaagacgtttgattaatggcgttttgtttactatctttatagtctcaatgctctcttggatcaccgttatggtgcacaaaagtacgagtcacggcttgcaacgtgcctatgacctactagttctagctgcattatttggcattgtcttattattaattttcgcctggatttttctattctggaatgcctatttcgtttggaaatatgaaagccatactttgcctaacttgcttactttaattaccggatttttagcattaattattagtattatcgtgctcttaggaccaggtaagtacttgccacgttggcttagtctcgcattagcttcaattcccgcgattgcaatttatttgggattggtgctttacaactttttggtaaacttgcttctatatcaaatttatcctcgtacctaccaccaagactatttaatcgttctagggtctgggctaatcaatggcgaccaagtatcaaaactgcttgcggctagaattaatcgggcaattcaatactctaaccgccagtatcaaaagggccgcaagcgccctatcctgatcatgtcaggtggtcaaggcgctgacgaaaaaatctctgaagcactcgctatgtctcgttttgcacaacggcgtggcgttagtgttgaccgtatcttattagaagatcaatcgaaaaacacatacgaaaacatgctcttttctaagcgtattgccacaaaagattttggtaattcccacttcagggcacgcttctttagcaataattaccatatttttagagctgctctcttggctaaggaagttggtttaaaagccaatggtgtcggtgcttacaccagattctactacttgcctaacgcaattatccgcgaatttgccggtgtgtttgtcatgcataaacgccgtcatttcgttatcatgggattaatcgttttattctttatcctgcaagctatcttagtcatgacaggattagaaagatttactgtaatttagaaaagagggatgcaatgcttcaactaaagcatatttttaagtcatataaggtgggggacaacatcacccacgctttagacgacgttacaatctcgttccgtgaccaggaattcgtcgctatcttaggtcctagtggttctggaaaaactaccatgttaaacgtaattggcggacttgaccgttacgaccaaggtgacttgatcatcaacggcaaatctaccaagaattttaaagagaccgactgggatgcttaccgcaacaataccgttggttttgtttttcaaaattataatctaatcccccacttgtcgatcatcgccaatgtggaactagggatgaatttgtctggtgtgcctaaaaaacagcgccatgaaaaagcaattgcggcgttaacagaagtgggattgaaagaccatctaaataaacgtcctaaccagttgtctggcggtcagatgcaacgagtagcgattgctcgagcaattgccaacgaccctgatattctactttgtgatgaaccaactggtgcacttgatactgagacttctgtccaaattatgaagttgatcaaaaaactatctaaagatcgactcgttattatggtgacccacaatcctgaattagctaaagaatacgccacaagaatcgttaatttccaagacggtaagattcgtcatgattctgatccttttagccctaataaggaagaagacaaatttaacctcaagcgtaccaagatgtcttactggaacgccatcaagttgagtttcaccaatattatgacaaaaaaaggtcgaactctgctaactgcttttgcttcaagcatcgggattatctcaattgccgtagttttagctatctctaatggttttcaaaagcaaatcaataccacaatgagcaaagctttagcaaaatatccgatttctatttcacagaccgcaactgacattacttcagctaatgcacgtaaagaatcggataaaaatgtcaaaaaccgcggctatgtaacggcagaacaagaccaaagcgaacaggcccaacacgttaataaaattagcacaaagtatgttaactacatcaagaagatcaatcctaattatgccaataacgtgtcttaccaacgcggcgtaagcttgaatttattagctaaaaacaagggaaaaattgaacgcgtgcaattttcaaatacggatcctgatcagactaattctgttctagctgctagatcccaagcgatgagttcaatgggactgggttcaagtgtctttcccactactttaaataaagagaaagactcatttttgaagcaaaactatcaattgctctcaggcacttggcctactaaggcaaccgacttggttttagttactgacaataaaaatactgttaacatcaatgccttaaaaaatcttggtttcgatttaaagaataaggaacacgtcaaattcggccaattagtaaataagcaatttcgtgtagttgctaacaatgattactatcagcaattgccaactggcatgtttattcctaaaaaggtaaataacgccatgtataacggtgctcaaaccaagctaaagattgctggtgtcattcgtcctaaaaacgaagattcaatggccttgttatcaactggaattgcttatagcgatcaactttcacaacgcgtgattaatgaaaataaaaactctgcaattgtaaaggcacaaaagaagagtaaccatagcgtattaactaaccaaaaactaaatgccaatgaaaagaaagctacaatgcagactcttggcggtaccagcatccctactggtatcatgatttatcccaacaattttgatgataaagataaagtacttgattatcttgacaaatggaacaaggggaagaaaaaatcagacaagattctctatactgacatgtcaaacgctgttaccacaatgactggcggcctcttaagcgggataacgaccatccttgtcgcatttgctggtatttcattaatcacatctatgattatgattggtattttaacttatacctcagtacttgagcgaactaaagaaatcggggtactcaaggcattaggtgcccgtaaaaaagacattactcgtgtctttgatgccgaaaccttcatcctaggtgttttctctggtgtattaggcattctgattgcttacctactaacattcccaattaacagtatcatttacaagattactgatctggcaaatgtagcccaactagatcctactgctgctattgttttgatcattatttcaactatcctcaccctcttaggtggtcatattccagcacgaatggctgcaaagaaagatgctgcaattgcattgcggagtgaatgaatttaataaagaatttgttacgttgttcacaataacctaaatttttagcaaaatatgtggtatcttagctttagcaaaaacaagtaagaaaggaacttttttcaccatgactgttaaaaaattagaaaataacagcgatgttaatgtagtggcagaagaaagcaaagttttaactgatttattgaatgaatcaactaagcaagtaatcggtcaagcagctttcgataagatccaaaacttaattaaaatctctgccgccaaagattatcaagaacttgaaaagcaaattgctagtcttaacaatcgcgaaatgattgttgttgcacgttattttgctactctcccactcttgatcaacatttcagaggatgtagaactagcaagtaaagttaatgtgcttaacaatactcatcaagattatctaggtaaattgagtgacacaattgacattgtagcccaaaagaaaaatgccgaagaaatccttgaacatgtaaatgtagtacccgttttaactgcccatcctactcaggtacaaagaaaaaccattttggaattaaccgatcaaattcatcaacttttgcgcaattatcgtgatgtgaagaatggcacaattgatcgcgatgaatggactgaacaaatgcgggcttgcattgaaattttgatgcaaactgacattattcgtggtcacaaattaaaggtagctaatgaaattaccaatgttttggcttactaccctaaggctttaatccctgcaatcaccaaatttactagtcgttacaaggaattagctaaaaaacacgggctaaacgctagtcatgctacgccaattaccatgggaatgtggatcggcggcgaccgtgacggtaacccttatgtaacggctgatacgctagaactaagcgctactttgcaaagccaagtaatctttgaatattacattaagcaaatcaataagctttatagagccatttccatgtctacttcttatatggagccatctgacgatgtaatgcacctatctgagctttctaatgatgattcaccattcagaactaacgagccatatagacgggcattctactatattcaaagccgtttagtgcacactgaacaaaaattactgaatattactaacaagaacactttcttaaagaaacgtgacctccaaaatcttgataaaatcccttgttatcaaaatgctcaagaatttaaagccgacttagaaatcatcaaaaattcacttgaagaagaccatgatcacgccgtagtagacagctactttactcaaattcttgaggctatcaacatcttcggcttccatctagctacaattgatatgcgtcaagattctagcgttaacgaggcctgtgtcgctgagctacttaagagtgctggaatttgtgacaattatagcgatttaagcgaagacaaaaagatcaagcttttactcaacgaattgaacaatgatccacgtaacttacacgccaataacaaacccaagtctgagttactacaaaaagaattaaagatctacaagactgctcgtcaattgaaagaccgtttgggtgaagacgtcatcaagcaacatattatttctcacactgagagtgtttcagacatgctagaacaagcaatcatgttaaaggaatacgatttacttgataatcaaaaagcccgaattcaagtggtaccactatttgaaacggttgaagacttgaataatgcccgggaaataattaaggaattcttaagctttgatatcgtcaagaagtggcttgtttctcaaaataattatcaagaagttatgttaggctactcagattccaataaggacggtggctacttagcttcatgctggaacctttataaagctcaaaaggatctaactaagattggtgaagaaatgggtatcaagattacctttatgcatggccgtggcggtaccgttggtcgtggtggtagtccatcatacgaagcaattacagcacagccattcaagtcaattaacgatcggatgcggatgaccgagcaaggtgaaattatccaaaacaagtatggtaataaagacaccgcctactacaacctagaaatgttagcttcagcaacaatcgatcgaatggcttctaagcaaattgttagcgaagatcatgtcgcagatttccgttcttcaatggatcaaatcgtagctaaaagcaacgaagtttaccggaaactagtatttgagaatcctaacttccttaagtacttcttccaagcaactccaatcaaagaaatctctggtcttaacgtaggttcacgtccagcttcaagaaagaaactcactgacttttctggcttaagagccatcccttgggttttctcttggtcacaaagccgtgtaatgttccctggttggtatggcgtaggttctggtttcaagtcatttatcgatgctgatccagccaacttgaaggaattacaaaatatgtaccaaggttggccattcttccactccctgctttccaatgttgatatggttttatctaaatcaaatatgagaattgccaagcagtatgcggatctttgcgaagatgaacaagttaaatcagtctttgatatcatcaatcaagaatgggaactaactaagaaagtcatcctacaaattgaaggtcatgatgaattaatcgaagatgcacctactcttaagaagagtctggaatacagaatgccttacttcaacattttgaactacatccaattagaaatgatcaagcgtgatcgtgaagatgtgattcaaggtgtttaccaaagtattattccaattactatcaacggtgtggcttccggtttacgtaattcaggataaaaaacacataaaattcagctaaaaaaggctcctcattgcctgttttatcaagcatttgaggggctttttttttaatttattaaactttttagttacgcctttttcataactaagttaagtggcgttacaattactggaacgacaatggctgtaaaaattgcttctactaaaccgttcatgcccagtgccataattaaaattaaaatcaatggcgtacctgaactataatttcctaggtaatgagttaagcttgctggatcatgcatgaagaaaatactcgtcagcaaaataaccatcacggtattagttaacgaagtgactgctccacttatgatataacccaatttcgcatatttagtcttactcatacccttcgcaataattcccgggaaatagccagccaaaatacttggtaccaatgaaattaccggattttggaacaacattaagctgaccatatcgccaggttgagtatatgcaacaatcaatctggtaataccccagaataagccaaagcctagacccgccttttgtcccattaacgtgccatagacggcaattgtcattggaatagtagttacagctggcaaagccgggataattcttacatagccaacatttggcacaaaagtctgtacaatcaataaagcagcaaagacagcagtaattgctaatcttttagtttcttctcttctcatatatttctccaacttaattctttagactcaattaaaccataattaagattttttctcagcaaaaaagtttattatacaatatctaggtatattttatctaatatgacaagatattgtattttttattatttttttacttaattatgcattatccttactctctctaatgcataatcgtgttctataccaattaagaatccctttatatcaatactttatgttgtatgtcaattttgacatagccactaaatattgttaatctcgttttgtgttaaaaatcatttgatggagagaggatcaattttatgaataaaaaagtcaaaaaattactatctattggtgtgcttgcattgagtttaggtgcaattttaaccgcctgctctggtaaaaaacagggtgcaagcaataataaatcaagcgatgccaagcactctattgcattaattactggcggtaatggtgtaaatgataactcttttaaccaatctgcttgggaaggatttcaaagttatggcaaagagcacaacttgagccgcggtcgaaacggttatcaatattttcaatcaagtagtgctgctgatttcactcctaattttgatcaggcagctaaagctggttatcaaactatctttggcgttggttacagtttaaaagatgccgtagcttctgccgccaaacgctatcctaaaaagaattttgccattattgacgatgtaatcaagggacaaaagaatgttgtctcagctaatttcaagagcgaacaagcttcctacttggctggtgtcgtagctgctaaagaaaccaaaaccaacacggttggcttcatcggcggtgctcatggcgatattgtcgacctttttgatgccggatttactcaaggtgttaaagatcaagccaaaaaaatgcacaaaaaagttactatcttaaaccaatatattggcaactttactagttcagacaaggccaaatcaattgctcaatcaatgtacaccaaaaaagccgacatcatcttccatgctgctggtggtgctggtgatggtcttttccaagaagctaaagccattaatcaaactagaccagctaaagataaagtgtgggtaatcggagttgatgtcgatcaatctcatctcggtaactacactgctaaaggtgggcaaaaatctaattttgttttgacatcagtaataactggagtaaatgttgctgtcaaagatatcgccaatagagcttataataataaattccctggtggcaagaatttggtttatggacttaaaaacaatggtgtttctattgaacgaggacagatttcagcttcaacttggaaagatgcccaaattgctagagctaatatcctaaaaggcaaaattaaggttgccattcatcctaacaataaataaaagcatactagtatagtttgctttttataattacaatcaattattttttgcctgatcaatatttttgttgacaaaataccgaacaattaataaacttatttataaattgttcggtattaatattgtggaggacagaaataatgaacgtaaagttcaagaaaattttatcatttggtgtcgttttagcatcagttggcttgattctaactgcttgttcgggtaaaaagtctggtcaatcagccaacaaagatactaaacatggcattgccctaatcacagatgaaaatggtgttgatgatcattcatttaaccaagctgcatggtcaggatttaaagcatacggcaaggaacatggtttaaaacaaggaaaaggtggttatcaatacttccagtctagcagtgccgcagacttcactcctaactttgatcaagccgctacagccggctaccaaaccattttcggtgttggctatcaattagccgacgcagtcaagcaagcagccaagaagaatcctaaaaagaatttcgttatcattgatagcgttgactctgggattaagaacgtcgcttctgcaacctttgaaagcaatcaagcttcttatcttggcggattggccgcagcttacaccactaaaaccaacaaagtaggtttcattggcggtgctaagtcatctattattgatttattcgaagccggttttaagcaaggtgttgctgacggtgctaaagctcttcacaagaagatttcagttcaaacccaatacatcggtaacttcacttcaaccgataaggctaaatcaatcgctcaatcaatgtatgctaaccgcgctgatattatttaccaagcagccggtaacgcaggtaacggtgttttccaagaaggaaaagattacaaccaagcccgtccagcagctaaaaaggtttgggtaatcggagttgacgttgaccaatctaacctaggtaactacaagtcaaaagatggtaagaaagagaacttcactttaacttccgtcttaaagggcttagatgttgctactaagtcaattgctaatgatgcttacaatggtaaattccctggtggtaagcacttagtttacagcttaaagggtaatggggtttaaatcaccaaaggtaatttaaacgctaaaacttgggcagcagtacaaaaggctcgtcaacaaattattgatggcaagatcaaggttgctactgctccaactaagtaattcagctgcttagtattttgagaactcttcgttttttagcgaagagtttttctatagttaattaaggaagtatttatttacatgaaagaacagagaaataaagtaatcgagatgcgtcatattgtcaaagatttcgatggtttcaaggcaaatgacgatattaaccttacgctctatcaaggtgaaattttggctttgcttggtgaaaatggcgcgggtaaatctaccttaatgagaattttatccggcttgcttgaaccaacaagcggtgaaattctggttaataatcaaaaagtaaatattaaagatccaaccgtcgctaaaaagttaggcattgggatggtacaccagcacttcatgcttatggactcatttaccgttttagaaaatattattctaggacatgaatcaactaaaggaccagttatcgatctgaaaaaggcaagaaaacaggtcctagctcttgcacaaaaatatggctttgctattaatccagatgccaaaatctctagcattactgtcgcccaacagcaaagagttgaaattctaaaggtactttatcgtggtgcagatattttaatttttgatgaaccaactgctgttttaaccccacaagaaatttctgaatttattaaagtactcaaaaatttagctaaagaaggcaaatcaatcattttgatcactcataaattagaagaaatcaaggctgttgcagatcgagttacagttatcagacgtggtcacgatgttggtacttttgctgttgatcaagttagtgatgagcggttagccgaattaatggtggggcggcatgtcaacatgaagctaaccaaaccagcacctaacttgggcaagcaaattctagcaatcaaaaacttacaggtaaaaggaaatcacggtgccttaagcgttaaagacctttccctttcaatccgtggaggcgaaattttagggctagccggaattgacggcaatggacaagatgaactggttgaagcaatcactggtttacgccatgttaagtcggggcaaatcttaattgatagtcaaaatttaaccaaccaaaaagttcgcaaaatcaccgaagctggcgtagcgcatattcctgcagaccggcaaaaatatggtttaattcttcacatgtcattagctgacaacttagcgctgcaaacttactaccaacgtcccttctctaatcatggcatcattaatcatcaagcaattttgaagcatgccgtagatttaattaaaaaattcgatattcgaactactagccctgcattgccagctagcgacttatcgggaggtaaccagcaaaaagcaattatcgctagagaattaaatagaaacagcgatctaatcattgcattccagcccactcgcggtttagatgttggtgcaattgagtatattcataagcagcttttagctcaaagagcagcaggaaaagctatcctattaatttcatatgaacttgatgaaattatgcaattatctgaccggattgctgttttgcatgatggtcaaatttcaggcgaagtattacctgaaaaaactacagatcaagaactaggtcttttaatgaccggtgttaagaaagaagatgcaacaattgattaaagttacacctaaagtcaaaaatattctagtaccagttatctcagtaattgctggttttatagttggtgcaattatcatgctgatttggagttataatccttttcaagcatacagctccatgttctctagcgcactgggcaatatgaatggtattggtgaaactattcgtgaagctacgccattaatttttattgctatcggttttgcaattgcctcaaaagctggcttttttaacatcggtttgccaggtcaagcacaagctggttggttgacttctatttggattgtattggccaatcctcaattgcctaagccagtattattgcctttagctattattgcaggcgctatagctggtgctattgtggcaggaattgctggctatttaagagctcaatttggaactaatgaagtaattactactatcatgcttaactatattgtgctctatacttgtcaatatttaatgcaacaagtaatgtcctcaaaattaagaattgataccgatactaccaaaacaattccagccaatggcagcttaaagcttaactggttaactagcatgtttggtgattcgcgaatcaatgctggtattttcttagcaataattggacttattttttattggtatttaatgaaaaaaactaccgttggttttgaaatcaaggcagttggactcaatccttttgctagtcgctatgccgggatgtcttctaaaaagaatattattatttcaatgttactttcaggtgcattttctggcttaggcggtgtagtacaaggacttggtacctaccaaaactacttcactcaaacaactagtttggatattggctgggacgggctttcagttgccttacttggtggtggaactgcaattggtattttattagcttcacttcttttctcaattttaaaaattggtggtttgggcatgcaaactattgccggtattccttatgaaatcgtatctatcgtaattgctgccatcattttcttcatcgctatcaattatgtcattggtttgctttttaaaactaagaagaaccgcagtgattactacattccaaccagaaaagaaaaaggacccaacaatggtgttgatggtccaggtagaaaagtaatcgaaggagaaaaataatgaatttcgttacaatgatggcgttaattgtttcatccactttagtttattctgcgcctctaatcctagcttctcttggtggtgtttacagtgaaaactctgggattgttaatattggcctggagggtatcatgaccatgggagcctttgcggcgattgtcttcaacctaactttcgcttcaacttttggtgcagctgctccttggcttggcactctagtcggcggaattgttggtttgattttttcattgcttcacgctgttgccacaatcaattttcacgctgatcatgtcatttccggaacagtgctgaacatcatggcaccacctttgggtgttttcttgatcaaggcaatttatgataaaggccaaactgaaaatatcaccgctaactttggctacttcagctttcctggtttaagcagcattcccatcgttgggccaatcttcttcaaaaacacctctgcccctgcttggattgccattattcttgctattttgatgtggtggattttatataagactcgctttggcctacgcttacgttcatgtggtgaaaatcctcaagcagctgacacaatgggaatcaatgtctatggcatgcgttatgcaggtgtattaatttccggctttatggcaggtcttggcggtgccgtctttgctcaagcaatatctggtaacttctctgtttctactatcgttggacaaggattcatggctttagctgccgttatatttggtaaatggaatccaatcggtgcaatgctctcatcccttttctttggttttgctcaaagcttaagtattattgggcatcaactgccaggaatcgatcaaattccatccgtttacatgcagattgcaccttacgttattacaatcatcgttttggtcctcttcctcggcaagtcagttgcacctgccgcagatggggttaactacatcaaatcgaaataaggaaaaaaggttgtttcacatgaaacagccttttattttacacatgtccacatagttatccacaagatatagcacttatatgtggtagtcttactatatcttgtactaaataacagctatcggcgttttctcagttggcattggaaaatcactgttaagcaatctaagctcatcatctgtaagtttaatcttttgtgttgcaatattttccttcatgtgttctacactacttgccttaggaatcgttaaaacattgccattgcgcatcgtccaagctagcattatctgatgaggcgtaacgccatgatcacgtgcaacaattttcaaattacgcgtaattcgaattgtgttgcccttgcctgaattaaatggtgaatacccaataaagtttacaccgtgctcttcttgccaagcttgcagatcaaattctgtcccacgttcactgatattgtataagtcttcattagcaaagcattcttctccacctggcactgtaaaaagctcctgcatatcagccgtatcaaagttagatacaccccaataacggatcaagccatctttttgtaatgcttgtaagccgtggatcgtatcagacaagcgatgactgccccgccagtgtaatagataaagatccagatgatctgttccaagacgttttagactggcttctagactctgacgttctagttttggcgttgcatgataggggtagaattttgaaatcaaaaataatttttcgcgatcatatcctttaatcgcttcaccaattagctcttcgctttggccatccccatacatttcggctgtatcaattacactcaggccatgatcaaggccatagcgaatagctgctatttcatcttttttctttttaggatcttcacccaaaccccagctaccaattcctaaacctgttagtttttcaaaattcatcctcgttcacttccttatgttcaaattttaacataattgattcgtaattatttttatcaatcaattgacaaaatggtctattccattttataatggactagaccaacaaatgaggaggacttaattatgaaagttattgttaccgaaaataaaattcaaggtggagcaaaagcatttgaaatttttgaaaaaggaatcaagaacggtgctaaagtcttaggtttggcaaccggctcaacccctgaaacactttaccaaaactgggtaaaaagcgatcttaactgtgaaaatcttaccagcattaacctcgatgaatacgttggtttaaccccagataatcctcaaagctaccactacttcatgcaaaagcatttatttgacaagaagccatttaagaagacttacgttcctgacggtatggcaaaagacgttgatgctttttgtaaagaatatgatcaaattatcaaagacaatcctatcgacattcaactattaggaatcggccgcaatggtcacattgcctttaacgaaccaggcactccattcaacatcggcactcatgaagttaagttaaccgaaaatactatcaaggctaatgctcgcttctttgacagtatcgatgaagtgccaaagagtgctatctgcatgggtactgctaatattatgcaatctaagaagattgttttgatggcttttggtgaaaagaaagctcacgcaatcaagaaaatgattgaaggcaaagtcactgaagaagtacctgcatcaattttgcaaaaacacccagatgtaacggtgatcgtagacgaggctgccgcacaagaattagacgacaaatacaagaactaaaaacaataatttaattatcagcatagaaaaagctaggctttctacaatcgtggaagacctagtttttttatttagcagcctgtatctacaatgaaatatacttcacaaaattgcatttttatataaaaaatgaagcataattcagttttttattgaattatgtttcattcctattcgattttttatttctacccttgacttttagatgtgaaacataatcaaaaaatcacttgtgtgccacaacatatcgtattaaacttaataattgtctacatatggtatttaagaaagaatgtgattcaagttattgttttaagtgggccaattggagccggtaaatccagtttaaccagtattctagctgaacatttagggactcaggcattctatgagggcgttgataacaatcccgtattgcctttatactacaaggacatgaagcgttacacttttttgcttaacacttacctccttaaccaccgtttagcacagatcaatcaagcaattcaagaaaaaaacagtgtctccgatcgttctatctatgaagatgcactgttcttcaagatgaacgccgatagcaaggtcgctgatccaaccgagttcaagatctacgatgacttactcgacaacatgatggaagacactcctggcaatccaagtaagaagcctgacttactgatttacattcatgtctcccttgatactatgcttaaccgaatcaagaagcgcggtcgttcatttgagcaaatcagcactgatccaggtttgaaagattattacgcaagacttttaaagtactacgaaccatggtatgaaaattatcatgcctcaccaaagatagaaatcaatggcgacaaacttgattttgttaccaacatggatgcacaaaaagaagtacttaaagaaattgatgaaaagttgcatgaaatcggcaacttataagaaaaagaaggaacgtgatgacagttattgttttaagcgggccaattggagccggtaaatccagtttaacaggtattttatctaaatatttagggactaagcctttctatgaaagtgttgatgacaatccagttttgccacttttttacgctgaccctaaaaaatatgcattcttattgcaagtatatttcttgaacacacgcttccacagcattaaagacgcgctcactgaagataataacgtcttagatcgttctatctatgaagacgccttattcttccaaatgaacgctgatatcggccgtgctacttctgaagaagtcgatacttactatgagttattgcacaatatgatgggcgagttagaacggatgccaaagaagaatcctgatttgcttgttcatattaatgtttcatatgatacgatgatcaaacgaattcaaaaacgtggtcgtccctatgaacagttaagttatgattcaactttagaggactattacaagcgtctgcttcgttattacaagccttggtatgagaactacgattactcacctaaaatggaaattgacggtgataaattagacttcatggctaatccagatgataaagaaaaagttttggatcaaattacagccaaactaaaagagatgggcaaattacctgaagattgggaaaagcctaccgatattcaaattgaagcataataaaaaccattcatttgcgaaattatcgtatttgaatgattttttgtttacagtgaatttttcgctttattgttgtataatttgaaaaaatgtgtttaaaggaggagtttgaaaatgatgttaaccgtaactggtggacaatggtttttcccacttgtcataatttgtctaattttgggtattgtcgcaaccatcgctcaaaagaaaaagctgactaaactaaaaagaataaccgataactttgcctatgcaatattagttattctcttaatcattgaatggattctatattttcaaaaacaatttaattttattactccagcaatctacacccttgttgtcatctatcttattggacggcaattactaatcagataccgttcttctctattgaaaaaattaggggctaaatataagcaactgacaattggacttgctactatttacattattttagttaccttattgcttttaatcggatctaaattttcaactatgggctggatcattgctggattagttatcgtagcctttggcttcgttagctacatctttgaaaaagacaaacaataatttcccaggaaataataactcgcatagagcttctatgcgatttttatttattcaatttttgctaatgccttcgcaaccccatcatgattgttatcagcagtaatttgttccggagcaaatttttgttttagttctgctggggcattacccattaaaaatggataccccacttcttccaacatatcttcatcgttatagttatcgccaaaagcaatgcaattttgcaagtctacgccatattcttgagcaactattttgactgcactagccttgcttacaccctttaaaacaaattctaataaattctctgctgatctaacaaaagtcaaatcaggatatttagcagttaattcttcttgcatacgatcaagatccgctgaatctcccataattagacctttatgcacgccctgcagtttttcaagttgattaattgtagtcggtgttgcttttacatcgacaattctttcttcatttttaacccgtgggctcttttcttcactacaataccaaacatagccactatagatattccaagctgcatcattatcttgctcatcaacgtagcggcaaatttcagctgcttcttttgcattaaaaaaacggctgattagtactttgcctgtttcatcaagggctaaagcaccgttatacgcgataaacggacaaactttcaaaatttgattaaccactgtcatcatccctttaggaagacgtgctgatgcaggaacgaaaatattaccattaataatttgtctacgaattgcatcccgcgttgcggcggttacctttaaatcatcattaattaatgtgccatcaagatctgaaaaaataagttgtgcggacattctttcacctttatttcttttttaattcttatatcctaggataatgctttatttatgctaatgaaagctgattcaattaaatgcttttcctatcatttaaagataaattgcaataaatgcccaagtaatcattaaaataattcgcgtttacaaatttatttatcaatgctaaagtataagagttgtgttcaataagttaaaacacgaacaatattttggggagataaaatgaattttataaaaagctactttcaattagataagtacaaaaccaacattcgaactgaatttattgctggtttaactacctttatcagcatgtcctatattttgtttgttaaccctagcgtactgggcgccagcggtatgaataccggtgcagtcttcaccgctactgctttagctgccgctcttggtactgcaatcatggggatcgttgccaactacccgatcggtgaggcaccagctttgggaatcaatgccttctttgcttacaccgtatgtattgggatgcatgtttcatgggaaacagccttggcttcagttttcgttgcatcaattattttcatcttaattactttattcaaattaagagaaaagatcattgattcaattccagctgacttgaagttcgctatttcatcaggtatcggtttattcattgccttcttaggtttgcaaaacggcaagttaatcgttgcaaataaatcaactttggttggtttaggttcacttcacgatccacttgtttggattaccatttttggtttgcttgtaactgttatcttgatgatcttaaacgttcctggtgcaatctttatcggtatggttttggcagctatcttcggtatttgtaccggtcaaattgcattgccacacaaggttatctcaactgctccaagtttggctccaacttttggtcaagctatcttccacgttaaagacattaacactgttcaaatgtgggttgttgttttaaccttcctgcttgttactttcttcgatactgcaggtaccttaatcggacttgctcaacaagctggtttcatgaagaacaacaagatgccacgtgtaggtaaggccttagcagctgactcaagtgcgatggctgttggttcaatccttggtacttcacctgttggtgccttcgttgaatcaagtgctggtatcgccgttggtggccgtaccggtttaaccgcagtttttgtagcgatctttttcttaatctcaatgattttcagtccattgcttggtgttttcactagccaagttactgctcctgccttaatcattgttggagtattaatggcacaaaatactgctcatattcattggaacaagttggaaattgcagttcctgcattcttgattattttagggatgcctcttacttactcaatttcagacggtttatcatggggcatgatcacctaccctatctgtatgcttgctgctaagcgtggcaaggaagtcacaccgatgatgtgggtactgtttgtagtattcctgatcttcctgtgggtactgaacttttagatgaaaaagaatagataaagaaaaggactaagttcgaatttgaacttggtcctttttgtgtattcactaacattactttttattcttatcgattataatcgataaaaacgtcaaaatcaccaatcttatcgagtataatcgataagattgcaaaaaaagagtcttttatcgactatacttgatacattccctgtcaagtagacagtagaattacataaagcttttattcctcagttgattaataatcagctgaggattttttggcttctcttattttcttttcgtgtattttttgccagtatttctcaattcgatgatttggtgcaatagggcaattcttaatattgcctttcatcgcttctttgcgcatttcaccagcagttaaaccgttaaaacgtttctgtggatcttcattaatgtagtaatctattgtcttacaaatagaatcattaagttcatcataactggccacttgaggatgaagaataactcgcatttctttgataatgccttgccagccttccattggaccattatcaatacagcagccaacacgagacattgattgcgtcatgccttggtcttctaattggttttggaaaggtgcgcgagtaaattgaaaaccacgatcactatggaaaagcggatgagcattagggtatgctttaacagcctgcttataggctgcttgaactaaagcagtatcgtttcgtttactaattgcgtagccaacaggatagcgatcatatagatcaaacacagtacatagatatgccttaggcaggttagcagcaacgacttcagtgatatctgtacaccatttttcattaggtctagatgcattaaagtctctttttaacttgttttcggccgttttctcaggcgttgtatgcttgaactttagcttctggtatctaggcttttgtgatctaatgccattgatacacatcaagcggtaaacagttttatgataaaccggcttttcatcagacatctgtcgattaactgccatggtcatcttttccgtcccaaacagactgttgttagacttagttatttcaatgatctttgcttcaatctttttgtctcgttcttcacgcttactcggcttgcgcttaggatcaaagtatttgtaataagctgagcgtgctattttagcccatttgcacattaaatcaatcttccaattgtacttttgatggcagtcatggattaactgatatgtttcttgtttccagcgtctttttattgcggcttgtctgtatcttggttgtccggcaagcacatcctttctaactgatctaatttttttaggaattcgttcttagtttgttcttctttgagctgacgctctaattccttaatttttcgattagccagttctaactcagttagctcttctggcttcttatgtctgcctcgtttatctgttaatcctgtttcaccattagctagatatttgtgtgtccagctgtaaacctgctggtaagaacaatcaaatttgacagctgtttgagtgtaattcttgtcgtgattaagacagtattgaacaatctgaattctttcttgctgggtagtttttcttcttgctttagtcatatagacctccggatggggatcatagtcccgattttctatatgactattatacttggaaacccattctgatactgttccattgcttctaatgccatatttattagctaaagaaggtaacgacattttgccagctaaatattcttgaacaaccttttctttaaatgccttagagtaatgattattgtattgagcattacttagaagggtatcacgattgctttgatattgatgaacccatcttcttacttgcatcgctccacttttacttggcatcttaagccgtttagctatttcaacgctgctcctattaccattcaagtattgttcaactgcccatatcttttgatcgaatgaatatttactttttctggacataaaaaatcccacctccatggataattgaatactttatgtatttaaatcgtccactttagtgggattgtatcaactcgataaaggctcttttttatattacccaggaaatattaacgtacagtttctaaacaatatgattttttataataaaatgcgtcataacaggcgaattttaattggctttaaaatttcttttttctaaaaacaagatagcctaaaagggtaaaaagaactatatagcacaatgtaccaattaataattgtggattagagagatgggaggttaagtgataagttgcataattataatactgtgtcgttaaattgagcatattcaaaggattccaacgaataatatcaaccggtccaatattataatttaataaattagatgatagactgcttcccataaagataataattgcatttatcataataactacggtgtttgaattaatcatacaagacattaagcaaataaggctgattattaacgtagaggttataatatcaacgcctgttgttgaaagcatatttataaataatgactgattatacttataagtcgcagtccaaggaactatttttgctataagtggaacagtgttaaagaagatagttacaatcatagctatggcatgtagaaaaagattataaataaaaattgtaatgaactttgcaagatatactgttcctttattttgagcatgatatagtaatgtcaaaatcgttttgttttggaactccattgagaaaatagttgaacctactatgaccaaaatcaacataattatttggctagagttataacaagtcataactaacaaattgccatattgttttcccatggccaatcccataaaaatcataaaaagaatcataaaactgataatccaccaaggcagcttacggtgacctaacttatagaattcttgttttaattccgcacgcataaaagatcacctccgcctaaatagaccgctttttaaacagtaaagcgccaatccaaaagaaaactacagcgtacactaaattagcaataattaattctgaattagtcaaatgtgttacagtaaccatctcattattcgatagttgcgtaatgatattaatcatatttaatggattccaggctaaaattgatttcaaaccaggaaaagccgacattgctaaatttgaaagatctgaaccaagaaatccgattgctagtccgattatgatcactgttgcattattcctaatcaacaaaataagcattaaagagagggcaacgataaatattaaataaatcatcgttcctcccatatttaggaatagcgcattgattaagggatgtccatgataatcatcatgccaagaaaatttcgaaccaaccatcaaggtcttgagaataaacgaaaagattatcccaaataccagtaagatgaaactataaaaaactaaaacaatgaacttagctgtataaagaatggacttatgtgatgttttgtagagtaaggttgccatagtattatttcgccactccattgcgatcatatcagaactaatagcaataatgatgataatagcccattgtcctgcaccgaatccttgagataagagtgagggcgtcattttataacttgtaccaactgtatacaacattagtactaataaaacgagaatcccatacaatggaatcttgcgatgagcaaatttatagaattcgtgtgagagattaattttcattattatctcccccttgttcttgccgtaagatgttgacaatcttctgttctaaagttaagccagttggagccaaatattctatccagatttcattatcaaacagtagcttttgaattttatctatatctttatgatcaactattacagcatcatcttgtctatcaaaaggaattttagcttgttgtagcaaattggtagtttgctttatatcagttgtttttaatttagattttggatttttttcttgagtgaatttgctcataggtgaatttataataattctaccgtgattaataatgattaccgatgtcattactttttgtaattcacttaagacgtgactggaaattaagaaggctgtaccacgtgcagcgtattcatgtatcagttttcgaattaagattgtagcttcaatatccaaaccattcataggttcgtcgagaataaccagttgcggattatttaacaaagccaaagctattcctagtttttgcttcattccaactgagtagtcttttgcctttcgatcaatataatctttcatccctaatcgattaatcagtttatccataccacttaagtctttagcatagagctttaaattatcatatccagacagaaaaggataaataacaggcttttcaattaaagcaccaacagattgtagtgctaaatgatctttaagagtaatttcgtgatcattaaaactaattgaaccagtgaatttagttaatcctagcaaagttttcataatggtggttttgcctgctccgttatgaccaataagtcctacaatttcaccaggtgaaattgtaaaagatgcatctctaataatctctttgtgaccataaaaaatatttatattgttaacttttagcatgctatcctatctcctttaactccggattagacagagagttaaatcacttttctaattaaagtacctatattaaagtctagtatcctttcctgaattgtcaaattaagtgcaacagtgtaagtgtcaatgtttttgcggtagcctttaaaccattagtctaaccttaatttcttaaatatttatatgacttaaatttctgcttagcttgcttaaataactattgccagctacctgtgcggttaatgcgccatgctggatgcctaaatgaacttcatgacgcttctttaagctgtcacgggccgctgcttttaattcctgttcagtcaatacagttatttctgaatcttcaaactcgctgctaagccaaaattccagctctcgattcttgatgcagcttaagatcctaagcatgccttctgctccagattttgaccatttcttgccttgccccttaacacggtaggtatacttgcggtggttgctctcgcagcagccaatggctttagtcacagtcagttttcgtttcttaaacggcttaatatcgtcccaatgacgatcaatataattccttaggcgccccagataatcatgattgagctcggtattcaattcatcaattagtcggctttctgcagtggttaggatagttttaactttgtcatagctgtatttgtattccaaagcagaaatcagcttgccttgcaggtcaggcgcaaaatatagcctttctttgattttcttatttaggtgaaagacatccaagaaatgctcatgacgcttgcatagccctacaatgtcatcgaagtctgttttggcatatccagcaccgccatcggcgttgctaagaattacagtatcagaaagatcataagtattggccaggtactccttggcttcgttcagcgcatcaagtcggcttaaagaaacaaattccttggcattgattcgctttctgcgtttcttgcttatattgacaatgccttcacagacctgatagcgatgaaattccaaccggcttttagtgcctttgatcaccacgccatcgccttcaagatacaaaactgggacctttttcttagtgcctgcggcatcatatcttgaatctgcttcttggccagctttaatatttttcccggccatttttaccaaattgcccacctgcatatggctaatattaaagccagacaggcaattgactgctagagcagtattgcgataagtggcaacgctgcttacttctaagatgtttttgactgctaaaatactgtagcgcttgtatttgtcaaagcccattaattcatccaagggataccttgcttgtttgcctgggcagacatatcttcttctgacatacctaacttcgccaaaagccatattgattgagcgctcattcttcttatcaatctgatagccctgtgctttaaccttggtaatcatttcatcatcaactttagctaaagccaaggccatgatttccttaatcaggtttaagaagaaacagattatttttctttcacgcttaatataattatcttcagactttataatatttgcgatttcagttacaattgaattcataaaagaccagcttctaatgtgttttttgttcttaacatcagactactggtctttttgtttgagctcaagtccaaattcaaaggacttgggcttttttaattatttattcaacttaccgtaaaaaattatacacttaggcaacagttaggctatgaagaaatatattgcttgaagagttcttctgctgtctgatattggaggattcggcgatatttgtggttaatggcattggttgcctgttgaacataagcttttgacttgtctttcatgctcttgcccttagggaagaattgacgcaaaagaccattgcagttctcatttgtgcctctttcccaaggagaatatggatgagcaaagtagatctgacatcctttgattttggtcatatccgcaaactcagaaccattgtcaaacgtaattgatttaaaccaattaggatgtctgtcaatctccttttgaagcagtctttgacaagtactggcccgatagtcaggaattttgataacaacctcaaaacgagtggttctttcagtcagtgtcattaaggcaggttgatttttacgtctgacgcctttaaccaaatcgccttcccagtgcagggaaacttttctgttttcaacttctttaggccgctgttcaatcgaattgccaagattctttttatgcggagcatggccaccatgactatgatggcgtttgtttctgcgtcttttaagcttcattggcaggtcgatattgcttatatccagcaatccttgatcaatataacgatagacagtgggcgtgctaggacatggataatttggcataatcctgtgaaattcaccaacgaattcatcaatgctagtggcatcaaatttggctttaaagcgtctgcttagcattctgaaaaagacggcatagtgttgcagtggattacgcttatagcagtttctgcggcgcttttcatgataaatttgtgcagtaatagtgctcatacaagacatagctgctgtctctttgcaggacactgcctcgtctaatttcacggctgatagttgatttatgacagcctacttcttgagcgatagcattgcaggaggttatgccagaatcaagcagagcttgaatttgtccacgttgttcgctgttcaattgatgataatgcttggaaatgctagaatttgagttggtcatgaagatcttcctttcttgatttttggtcacttcaagtttaggtcttcatggcctttttgtttaacacttagtgttgcacttcaattttaaatccgggtctagtatccttttaataaatattttttactatgttcacatatgaacaataaatttaagattatctctaataaaaccgattttaggatttttttgaataaatttgctttatttgtttaaatgcagtttcaaaaccatcttttagagtattcaagccctgcagttctaaagcggcccacatcaaccgtaaattgcgatcatcatttgtttccaaaaaatttaacataaaatgcatgtatttgtatcttattttttcaaaagcaaacctgtctgtaatatctaagccagaaattattgcatctaatctttttgccttctttagatcttttttaataagaatacgcgtggtgctagttaaatcgttttagttaataaaaaagtccaatcttgttagactcaacttgtataataatagaaaagagcctgatctgattgaactgccttaagcttaagcgttttagccaccatttacaagttagttttaaagatttagtgataatttgtcggcactggtatcgtttgtatgcaccggctgagtttactcatcggcgaaatattgatcaaattaaaactacggacagtctgattttggctttacttatctggcaagctaagacaggaattgaatcacaaagaagattctgtgaatgtttcaattgtttatcacactcacgttttaatcggcgttcacgtcagctattgcaattgatttatcagatacggcaagaaatgaataaaaaggttgacctgaatggacatttcttgatcattgacagctttccggtacctgtttgccaaccaattcgcaactatcgtgctaaaatttttcgcggttatgccaacattggttataaggccaccaagaaaatttacttctatggtttcaaagttcatgccattgttagcgatgacggttacattcttgattatgtcgtaacaaaagcatcagttcatgatgccaaggagacagttgaactgctggaaaatgcccatccatctaattactatcttcttggcgacgaaggctatttaggcaaagaactgcatcaacagctaaaacaaatgggttatgaactttggacaccatatcgtaaaaatatgacaggagctaaaaagcacaatgatcatcaattgatggctattcgcagaacaattgaaagcgacttttcgcttctgacctattacaatgccgagaacaatcgagcacgtagtctgataggctttcaaagccggttggaaattgtaattttagcttataatttggcttattgtctagaacgatttaactagcaccacgcgtataagaatatattctgcattaatcaaagtatttaaaatagctgtagaaaatttcgaaactgtcaaatcttttgtgtaaatagatctttctcgtaaattgattttttaattatttatttaatcaaagtaggattctaaggtgtcctgaacctgaccaaagcctttgtggattcgattgaaatagcgttcgttgtagctcattgcttgaatgccaataaaagtatcaagcgactgttcagttggaaactctgccttaagcttagctttgcgcttgatcacattgttaaatgattcaatcatgttagtcgaataaattgaagctctgatctgcttgggatagttataaaagaccagcagatctggttctatgtctttcaagcttctgataacatggctgtaaaccttgccccatttggtatagaagtcatgcaggacagctgtggcttcttctttgtttgtctgttgatgcacctgtttgaattcgttcatgatcttttcacgatcgtcgacgcgtactttagcgcagatattgcgcatgacatgaaccaaacagcgttgaaaatgagctttaggataagtcctggccaaggctgttttcatgccaacaacaccatcagaaagaaaaagctcaacttgctttaagcctcgggatttcatgttttgaagcatatctgtccagacttcaatgttctcgctaggcgcaatgcagtagtcaatgacctccttgtgcccattaggcttgatgccaatggcaatatagactgcttcacgctcaaatgtttctcggcgcaaaggaaggtatgtcgcatccaaatagacgcagaaaaacttgtcgcttagcttgcgtttgtggtaagcctcaacctttggaatcatctgcttggaaatatttgatacctgagctggactgtaatggctgccatacatcttttcaattagatcggctatttccctggtggtcacgcccttggagtaaagcttgataatcatgctttccaagatatccgagtgctgcttgtagtcaggcagcgtgtgctgatgaaattgaccgttgcgatcccgaggcacttgcacttcaattgggccaaattgcgtatcaactttgcggaaataagcaccatttctagagttgccagtattccagccatttctggcatagggatcatagcccagaaaggcagtcaattcagcttctaacaagttattaacagcctgttgtagctctttgcgcaataaatcatttattttgtctggattgaatagagcttgagcaaaatctttggtaaaatcattcatgaaggagttcttctttctgtatgtgtttttttgttcaaaccaatcatacgagaaaggaactcctttttctaatgtttaaagaaataaatttaaggaatcattcatccttacacaaactattttacagtctcaaaatttcatttccaaatcgttattatttttaaaatagaaaactagtgaaaaagataaactataaatagttcttgggctaataagattctgagtattaccaaagaagtacacatcatcgtaataccaaacttcatctccagataaaatttttgaaaagtacatcgataatctctttttatagttatctgtaaaaatatccactcctgtaagatcgtaataagcattacaataaatggctgcttttaaaaaagttcgtttatcgaaactgtcattttcaacttctgataacaattttttagattgcgtttttaagtaattaatatcattactttcatatgcttttgaaacttctaaagttatattttttagataattcgaaatattattattaaagaaatctattttttggacatgaattacttcgagtagtttgaatactttttcaatatctaaacctgcttcgcctctttcccatctttctaattttgaacgagaaatacctactgcttccgcagctttactacttgaaattttggttgcctttcttaattttctaaattttctaccatatgtttctttcataacccactcctagttacgttcacaaataccttcaaaataatgatccagataaaggactagttttacctccttaatgatgccttaatgcaataaaaaatcaaactcataaatattacctaaattttcatttagcgctactaaaaaagcctaataccatcatcaagggtattaggtctttattacctaggaaatactaacgtacagtttccaaacaatatgattttttatgacagtttgggcaacgcaattttctagtatgtggcgtgtgtgccgcaaacataaagcttttaagttctggaacaaatttgtaatcgcaattaggacaaatatatgccactttttgataataatttttaagtaacacgaatgacattgcaatcaagcttactactaaaatagctaccgaaatataggctgcagtgttcatcttattgatgatacagtacgcaataaatgccataccgaccaattcaacagtgatttctactgctgacaatttccacattgaacgtgttacctctttgtatctagtttcattattcatgattttcgtaatgtcagtaacttccgcaatattattgggtttacttagaaccttttgtagttggataattttcttgttttgctcttctaatttttgcgtttctgctttatttctttttagttgatcttcaagcaaaagatcgattaatttatcaccatttttatcttctagtattttttgaatatcctttaacgaaaagccaagctcctttaaaaagatgattaattttaattgttttacctgctcatcagaatataaacgatagccactttcactaactcgactgggtttgaccaaacctttttgatcatagtaacgaatggttctagtggttatgtttaacttctttgctagatctccgattgtgtattctgacattactttctcacctcaaaacttaaatatacgggtttacgctacgtcagagtcaagaataagctaaattttccgtaaaaaacttcaaaaagcaaatattttgctcttttcctattgaaattattaacattaactgtataattttaagtgaatgttcactttatacaaatttcggaggactaaatgaacgcaatcagtaatttctttcatttaaaggagaacaatacctcctttaagaccgagcttttagccggtttgactacttttgtaagtatgtcatacattctgttcgttaacccaaacgtcctaggtgccagcggtatggataaaggtgctctattcaccgttactgcattgtcggctgcctttacctgtatcgtaatggggcttatcgctaactacccaattgcttccgcaccaactttgggcttaaacgccttctttacctatactgtttgtttaggcatgaaggttaagtggcaaactgctttagcagctgttttcgttgcatcaattctgttcattttgttaactgtctttaaggtacgtgaaatgatcattgatgccatccctgccgatattaaatatgctatttccgcaggtatcggcttattcatcgcctttatcggtttgcaaggtggtaagttgattcaaaacagtgattctaccttagttactattggtagtctcaacaaccctactgtttggatcactatctttggtttaatcattactattttcttaatgattgccagagttccaggtgccatcttcatcggaatgatcgccgctgctgtttttggcatagtgactggtcaaattcccatgcctaaaggcgttatctcttcagttccaagcattgctccaacttttggtcaagcagtcttccatattggcgatattaataccgttcaaatgtggatcgttgtctttacattcttacttgttactttctttgataccactggtaccttaattggtttggttcaacaagcaggtctgatgaaggacaacaagatgccacgtgctggtgaagctctagcagctgattccagtggtatgttggtcggttctgttcttggtacctcacctgtcggtgcctttgttgaatcaagtgccgggatcgctgttggtgggcgtaccggtttaactgccgtttgggttggtattttcttccttatttcaactatcttcagtccaattttgagtgttttcactacccaagttacggcaccagctttaattattgttggagtattaatggccgaaaacttggcacacgttcactggactaatcttgaaattgccatcccatgtttcttaatcgcattgggaatgcctcttacatactctatttcagacggacttggctggggtttgattgtctaccctgtatcaatgatcgcagccaagcgtttcaaagaaatcacgccaatgatgtggattttgtttattgttttcgtaatctacttcgttgttttaaatgtaaaataattctatcttataacccccttatcttacttttacattaatatataccctcacgcgtggtgctagttaaatcgttctagacaataagccaaattataagctaaaattgcaatttccaaccggctttgaaagcctatcagactacgtgctcgattgttctcggcattgtaataggtcagaagcgaaaagtcgctttcaattgttctgcgaatagccatcaattgatgatcattgtgctttttagctcctgtcatatttttacgatatggtgtccaaagttcgtaacccatttgttttagctgttgatgcagttctttgcctaaatagccttcgtcgccaagaagatagtaattagatggatgggtattttctatcagttcaactgtctccctggcatcatgaactgatgcctttgttacgacataatcaagaatgtaaccgtcatcgctaacaatggcatgaactttgaaaccatagaagtaaattttcttggtggccttataaccaatgttggcataaccgcgaaaaattttagcacgatagtttcgaattggttggcaaacaggtaccggaaagctgtcaatgatcaagaactgtccattcaggtcaacctttttattcatttcttgccgtatctgataaatcaattgcaatagctgacgtgaacgccgattaaaacgtgagtgtgataaacaattgaaacattcacagaatcttctttgtgattcaattcctgtcttagcttgccagataagtaaagccaaaatcagactgtccgtagttttaatttgatcaatatttcgccgatgagtaaactcagccggtgcatacaaacgataccagtgccgacaaattatcactaaatctttaaaactaacttgtaaatggtggctaaaacgcttaagcttaaggcagttcaatcagatcagactcttttctattattactatttacaagtcgagtctaacaagattggacttttttattaactaaaacgatttaactagcaccacgcgtataccctcatctaaccaagtagcatgtctacttggtttttatgctaaaaagatgtctgttaatagtatggatgatgacagcagattctattagatgatataataatcaaagaaaggctgtgactaaaatgaaatcatataaaaaaattcaagctaatgttgactcctcactagcacttcaagcagaaggaatttttcaagatatagggctcaataccactaccgcaataaatgtgttcttaaagaaagttgtggcaactggtggtatcccatttgaattaaaagaaactcctgaacaaaaagcctcaagagaattaattcaaagcatctcaaaaattccccacaaagaagctaaaaccaaaaaggaaattgaggattggctagatgaggactaatgatattgtagatatttatgttgcttacattgataagcctggaggaaaaaataggcctgtattaataattaaattactaaacagtaaagcttggctgctaaaaatcacttcaaaatataaagaaaaaagtgaaaatatccgaaagcattactttcccatttttgactggaaaaaatataatttagataaaccatcatacattgatactaaaaattatttaatagttactattagtgatttaaatatcgaaaaataccgaggccatttctcaatagcagatttacgcaaattaaaagattttattgacgaaaattcaaactaagaattaaactatatgttttagttcctaaacacaatctcaaatatgagattgtgtttttatttatccaaatggcatcttttgataatcatttgacgccttatgatgttcggattcttctaaattgccgctatactattttcaacaaatcgagttatgaaagatttatttaggaggaattcattatgacaactcaagaaggaaaaactgctttaattactggttcatacggtgggcttggtacccaattcgttaacattcatgcttcacacgggggtgacctaatcctagttggtcgcaatgctaagaaattagccgatcaacaaaaagaagcccgtagaaagtacaacgtaacggcgcatattatcgatgttgatctctcacaaccagatgctgcgcaaaagatctatgatacttgcaaaaagaacggttggactattgactacttaatcaacaatgctggctttggtggtcaaggcgaattcattaaaagaagtatggaacaagacatgtccatgatcgccgttaacattgaaacgcctactcgtttaactaaattatttttacctgacttcgtaaaacgcggccgttatgcctggcccacttcaagccgtttactacgctactaaagcatacgttacaagctggtcaaatgcgttatggcgtgaagtacaaggcacaggcgttacggtaagctgcttaatgcctagcgctatgcaaaccggttttatcagtcgtggtgatttgagttcaactcaattattcgcccatgcggttagtccataaggtgttgcaaaagctgggtatgaagaaatgattgaaggcaagcttaacattaccgctggtttaactgcagcccaaaaaccattcatgaaattggaaccaatgttacctaagaagatgctcatgaacaatgtttataagatgcaagaacaaggtagtagaaagtaatcaacttatcttataatatggatcaaaaggatggtatttgaatgaatcactttattttagatggtcgctatgaagacctactctcttttaacgttgaagaagcacttaaaaaagccaatattcctgaagattgtttcaaaaaccccatccttcaatgagtgaacaacaatactacaattttatggcggctattggtgatcagattagtgatccattcactccaattgaaattgcaactacaaatccaattgaatctttctctccaccaatttttgcggcatatagtagccgtaacggagatatttttatcaagcgtctagccaaatataaaaagctgattggcccattatcttttaaaattgatgaggatagcaagcagctctctattaccctaactccaagtaatcagcaatattccctaccctcttttctagttttatcagaatttgcatttttagtgggacttttgcgcaagacgaccaaagaagctatttccccgctgaagatcacaatgacatcccccgtcaatgatgagcaggtcattaacttctttggctgcaaaatcgaatcgggtaaacgcaacaccatcacttttgccaaaaaagacttgcaggtcaattttattagttataactaagcaatgtgggattatttcaagcctgaattaactaaacgcttatctgaattatccgttgatgattcaactagtgctagagtacgtagcatattgaccgaattacttcctaatggtgaatttacaattgacgatgtagctaaaaagttaggttattctaaacagactttacagagaaagttgagtagcgaaaacactacttttcaaaaacaactgaactccacccgagaagttttagcgctaaattatttacaaaacaccgatatgacaactagcgatattgcttaccttctaggctatcaggaatttaattcgttcttacgtgccttcagcatctggaaaggcataagcattagcgaatatcgtgaaaaaatgaataaataataaaaagcagatatattttctgtttttttactttataaaggaaataatatgagatttttgctataatttactttataaaggaaataatatgaaaattgctaaaaatttactttatgaaggaaataatatgcagttaaatttaattaaccgcccacagtatttaaatcaattacttcaatttcaaaatacagaattcatcaaagtactgacgggagtacgaagatcaggcaaatcttatattttaatgctttatcgtgaatatttactcaaacacaacataaatgaacatcaaatcatttatatttcttttgaagactttgataatatagatctttatgaacctaaaaagctttattcatacttaaaagaacgaattattagtgaccaaagaatgtacattctacttgatgaaatccaatatgtatcagattggcaaaaagtagtaaatagccttcgacttaatcctctacttgatatcacaattactggcagtaattccaatctattaagtggagaattagcaaccttactatcaggaagatatgtagaaatacatgtttatcctctttcttttaaagaaatgctagattttaaacatatttctgaaccatcagagcgtcagattgataacttatatgatgaatacattaaatatggtggtttccccgcggtagtgttagcaaaagaagaattaaaacaaactattctttctggaatttacaataccattattgtcaatgatatcggctacaaaaatggattaagagaaccagaattagttgcattagtagctaaatatctagcagattcgattggtcaattaattaatccgaacaagattgtaaatacactaaaatcagcaaattttgatatctcttataacgctgtgcagcgttaccttaaatattttgaagaagcatatcttttttataaatctagtcgttatgatattagagggagaaagattctttctactcaaggtaagtattacattgtagatactggtttgcgtacccaagctttaggagaaagaaataatgaccgcggtagtgttttagaaaatatagtttatgtcgaattacttcgccggggctacacagttcaaattggtaaattagataataaagaaattgatttcatcgttttcaaggtaaatgataaacaatatattcaagtaacctaccagcttccagaaaattctactagagaaactgataatttacttcaaattccaaataactacaaaaaaatagtcatcactggccgatatgaaaatgaagaaatgatttccggtattccaataatcaatattaaagattggttattaagctctaaaaactgatcaaaataggatcgactaactcatgtcgatcctatttttaaattaaattatgttttttacaataagtaaaaattccgtcatcttgcacgctgccacagatgtcatcagcaatttccttcacatcgtctgttgcgttccccattgcaacgccgtgaccaacagtctttaacatttcaatatcgttgccgccatcaccaaaggctattgcttcgctcacagggatttgataataatctaacactttttcaattgctacacccttactaccagtagctggaataatatctgctgctctatcccaccaagctgttaccttagcattttgcgtattagctacaagtccgtcataatctttttcacgacagcctaccattatttgataaaccgtatcctgatcgacaaccacatcaaaatctggcgccactctcaaatccgttccaccaatagcaaagtattcctttaaatcctcatcaacaccattagctgcaatccgtgttttggtagctacagctaacggccgatttattttctgagcattttgaatcatatgcaagacatctccttgccttaacggattatcaaaaacaatgtcttgatcgttatagcagtaagaaccattaaaagttaaatatgcatcaaaatctacacccaacttaggcagttgcactggtggtctgcctgatgcaatacaaatcataatgccgttgtcttgtaaagcatgcagtgtctctagcattttaggtgtaattgattttttcttttcaattaaagtaccatctatatcaaaaaatattatcttaggtttgctcattatttttaccttctaaagaattttctactaattattatactttaaccgatatttcccaggaaatattaaaattgagctctcttcctcaacatctgtgctaaactagatacaattagtttctttaaaagttaatagttacggaggaatttttaaatgcagacattggaaaaagtctttcatttacaagatgctcataccactgttaaacgtgagttaatcgctgctttaaccacttttgtcagtctctcctacatcttattcgttaacccaaacattttgcacgcagctggtatccctaaaggtgccgcttttactgtaacagctcttgccacagcagttgggtgttttttaatgggttttattgctaattatccgattgccttagctccaaccttaggtagcggtgcctttttcgcttataacgtatgtgttgggatgcatatttcttgggaaacagctttggctgcagtccttgttgcttcagttttattcattttaattactgtctttaaattacgcgaattagtggttaatgccattccacaagatatgaagtatgctatttcagcaggaattgggttattcatcgcttttattggcttaaaaaatggtcaattaattgttaacagcgattcaactttagttactctgggaaaatttagtactccagcagtttggatcacattatttggcttaattttgactgttgtattaatggcattaaacgtgcctggttctatctttattggaatgattgttactgccatcttcggtatgatcattggtcaaattccattaccacataacatcgtttctggtgccccaagtattgcaccaaccttcggccaagcggtttttcacattaaagatattaatacagctcaactttggatggttgtactaactttcttattagttaccttctttgatactgctggtactttaattggaatgactgaacaagccggtatggttgacaaggatggcaagattccacggatcggtcgtgcttttttggctgattcaactgctatggttgaaggtgcagtctttggtactgctccacttggaacttctgttgaatcaagtgccggaattgccatgggtggtcgtactggtttgactgctatctttgttggtattttcttcattatcagtatgattttcagcccattgttacaagtaattccaactactgtaacggctcctgctttaattatcgttggtgtactgatggccagcaacttaaagaaaatcgattgggaaaagttcgaaattgcctttcctgcttttcttaccgttgtagggatgccactgacttactcaatttcagatggtttggcattaggcttgattgcctacccaattaccatgattgcttctaagcgttataaggaagttagtcctatgatgtatatcctgttcgtagtatttatcatctttttcttagttacgaatttataaaaagaatgctaaagataagcagtttgaagctgcttattttttattgacttgatttttattttgtactactgtaataaatatataagacagtttttatgggagaagaaaaatgagactgtaaaatagtttgtgtaaggatgaatgattccttaaatttatttctttaaacattagaaaaaggagtacgcgtggtgctagttaaatcgttctagacaataagccaaattataagctaaaattgcaatttccaaccggctttgaaagcctatcagactacgtgctcgattgttctcggcattgtaataggtcagaagcgaaaagtcgctttcaattgttctgcgaatagccatcaattgatgatcattgtgctttttagctcctgtcatatttttacgatatggtgtccaaagttcgtaacccatttgttttagctgttgatgcagttctttgcctaaatagccttcgtcgccaagaagatagtaattagatggatgggtattttctatcagttcaactgtctccctggcatcatgaactgatgcctttgttacgacataatcaagaatgtaaccgtcatcgctaacaatggcatgaactttgaaaccatagaagtaaattttcttggtggccttataaccaatgttggcataaccgcgaaaaattttagcacgatagtttcgaattggttggcaaacaggtaccggaaagctgtcaatgatcaagaactgtccattcaggtcaacctttttattcatttcttgccgtatctgataaatcaattgcaatagctgacgtgaacgccgattaaaacgtgagtgtgataaacaattgaaacattcacagaatcttctttgtgattcaattcctgtcttagcttgccagataagtaaagccaaaatcagactgtccgtagttttaatttgatcaatatttcgccgatgagtaaactcagccggtgcatacaaacgataccagtgccgacaaattatcactaaatctttaaaactaacttgtaaatggtggctaaaacgcttaagcttaaggcagttcaatcagatcagactcttttctattattactatttacaagtcgagtctaacaagattggacttttttattaactaaaacgatttaactagcaccacgcgtaaaggagttcctttctcgtatgattggtttgaacaaaaaacacatacagaaagaagaactccttcatgaatgattttaccaaaaatatggctcaagcactattcgatcaagacaaagttaatgattttttgcgcaaggaaattcaaactgcagttaatcaattgcttaaagttgaattgactgcctttctgggctatgatccctatgccagaaatggctggaatactggcaactctagaaatggtgcttatttccgcaaagttgatacgcaatttggcccaattgaagtgcaagtgcctcgggatcgcaacggtcaatttcatcagcacacgctgcctgactacaagcagcactcggatatcttggaaagcatgattatcaagctttactccaagggcgtgaccaccagggaaatagccgatctaattgaaaagatgtatggcagccattacagtccagctcaggtatcaaatatttccaagcagatgattccaaaggttgaggcttaccacaaacgcaagctaagcgacaagtttttctgcgtctatttggatgcgacataccttcctttgcgccgagaaacatttgagcgtgaagcagtctatattgccattggcatcaagcctaatgggcacaaggaggtcattgactactgcattgcgcctagcgagaacattgaagtctggacagatatgcttcaaaacatgaaatcccgaggcttaaagcaagttgagctttttctttctgatggtgttgttggcatgaaaacagccttggccaggacttatcctaaagctcattttcaacgctgtttggttcatgtcatgcgcaatatctgcgctaaagtacgcgtcgacgatcgtgaaaagatcatgaacgaattcaaacaggtgcatcaacagacaaacaaagaagaagccacagctgtcctgcatgacttctataccaaatggggcaaggtttacagccatgttatcagaagcttgaaagacatagaaccagatctgctggtcttttataactatcccaagcagatcagagcttcaatttattcgactaacatgattgaatcatttaacaatgtgatcaagcgcaaagctaagcttaaggcagagtttccaactgaacagtcgcttgatacttttattggcattcaagcaatgagctacaacgaacgctatttcaatcgaatccacaaaggctttggtcaggttcaggataccttagaatcctactttgattaaataaaagattaaaaaatcaatttacgagaaagaactatttacacaaaagatttgacagtttcagaaaaatgaaaatcaaaaaagtactactgaccacgtctttactcacgattagtttgattactctatcgggatgtagtttccacctgtttaccaacaagaattccggtcctacaatcaaacgaactttgtcctctaagaaattcaattcacttaaggtagccagtgacattactgatgttgaattacatgcaagtaatcaatacaaagttatctatcatgggctcaagcgtttcaaacctagcgttaatgtgaaaaatggtcagttaaagatcactcaaactagtaatggtgtttcttataacatcaaagaaggcaatacagtggcaatctacctacctgccaaagaattacaaaatatcaatattaatctttctgatggcgatatcgatgctgatggcaaggttcaagcaaaaaatgtcaaacttcacagtgacgatggtgatgtcaactttgacgatttaagaattagctctggcaaaattacctcagatgacggcgatatttcagtttctaatctacttactagaaaaggcgccacagttgaatcagatgatggtgacattcgtattagaaagagcaatgccagtggttaccgcctaacttctgacgacggtgacgtcacattcaagggagatacttctgataatgatgacggtggttcttactacaaaaatactaagagttctaacctgctctctgctcacagtgatgacggcgacgtcaacgttaactaaatttcgtcataaggcgataagtttcacatgaaacaaaaaatcaatgcatcattgataatgcattgattttttacttttttcctcattcatagcataaacacgactttacaagattatttaagtttctattgaaatagacataattttaatacgaaaaagataagactaaattctacttttccattaaaaaatatttaccaattttccattttctaagtcaaaatgatgcgtaaatttcttcatcgtcgttggtgaaatatggtggtcaatttcaattactgttaatggcgaattcaaaaagacattatgaatttgctcagcagtttgcggatcaagtgaagcagttccttcatcaactactaaaatttctctttggaatagaaaggcacgcgctaattcaattctttttctttccccacctgaaagattatgcccatttttttcaattacggtatctaagccatgtttttgaacgtaattagttaatcatgcttgttgaaccgcagccatgatttgtttttgatcaaattgtttaccaagagttaaattaaatcgtaaagtctcattgaaaatttgcgaagtttgttgaacttcactaaaaatttgcgtttcaacagactgattattaaccaaaactcttcccttctgcggagataatttacccattaacaccttaagcaaagtagatttaccttcaccggactttccagtcaacagaattttatcccctctattaacgcataaactcacatcattaagcactggactatcagcttgatagccaaaagttacattgtccacatctaattgctcaaatttgattggagcctcatcttgcttagttgttaaaggtttgaaagacaacaacttagcggtcattggtttagtggcggcaatctgattacgaatactattaatactaaagaaactatttacaatccaagcactagagtattgcacggccacaaaagaagccaaagcaacgtgtccttgaattaccataataattccgactccaatcggtaagaagtctagtgagtaagctaataaattaacgtaaaaatcactcttagcaattgtatcgtcacgttcacgtttattctcaacagaatttttgattactttactactcttttttacaaatagagataatacattgtaatttaaaaccgtattgatatttttgagtaaatccgacataaatgttacataactacctgttgatttactccaatcggatgactgcttggctgttttcttgctaaacaaactaggaataaagcttgaaagacttgcaaaagcaacgaagactaatgtcaagactacactatttatcagcgcaatagtaacgatcccaacgattttaaccacagtagatactagtgaaaataactgtctaaagtacttttcttcaatcaagttaagatcattattaatgaaagaaattcgattagaaatttctttttctcctgtttttacaaaatccgtttgcatcaaatgctcacgaaccttttgattaaatagtgctacgttacgattaattactcaattatttaagtattctacaattacaagtaagatttgtaacactgtaattacgataatcattctcaccgtatttggaatacttttccttgtaactaacgcaaagatttcggagtatgaccatgtgctaaaaggcaaagaagtccgcttaaacatgacagaataatactgagcgaaaaccatttgaggtcaataaactttttcataaatgaatctccctttcaattaagttggattcattatctgctttagttcacgataaaaatagctttctgcaaaagtgatcttcaatctgcatatatgcagattattctggaagaatagacagaatattttctaaattacttgccttgatcaatttcttaatagctaatacctgctctgtatctccagcaaaatagcattgataaaaatgaccaatgattttatataagactaaagatggcgtttgacttaattgcccaagtaaataaataggctctttattatcttttacaaatttattttcagcacaagtatataaataattcacacaaatagtggcaattgttgtttgcattttttctgtctgctcagacattttatcattataagtagtgaaaattttttgaaagaaaaaagcaaaatcgtcatgagtaaagatagaggtaccaaaattggctaacaaatctaaactaaatttatcttgaagccaattgtcgcctgcaaacaagcgttgcagtactatatttttatctttgacatcaaatttacgttttctttctagcaaggtaagaatcaacttagctttgattttcagaagatcatgatgcggcagttgttgaatttctgttaccaattttctaacttggttaaagtcttgattataataagcagtctgtaattgatcacctaaattgttttcatcgtcagcttgtgcgactgaattttgcttaaagaattcatcaaatgaaattttatttttctgcaaaattgccattaagtccttagctgatatttcatgcaatccgcgctcaatcttagaataatgggcaggtgataaaattcctgttacaaattgttcttgcgtcagtccccgcgattggcgcgctttttttaatgctgtgttaatttccatagctgtttttatttcaatttacggtcccttttagatacaaaccaaattgtcccatcagaagttgcccagtgtccatcagaagttttatgaaatttcagcgtcagtttcttactgtgtagtgtccagctatttttaccttccattgtgacacggacccggcctaatttttctgaatttattttgttattgtagtctttgggatcatatgaattatgcccatatactttataaattgcttttgctgccgcagtatttggcttaatgtatttataagtaccagatgcatcagtcttaaaaactgggctggatgcatcgatttgaccactatttttccccagagctatgttcaccaacatgccaagatgattttccattacagaatctgtttgatggggatcataggttgtaagatttttattagcaaactgttctggaatagtttgctgattgcgataaaacaaccagccaccgactgccagaactacgactactacaacagttatgattgtagctttctttttcataaaggatcacctgttatctatcagcttttttctgaaaagtaattaatccgtgtgaaactaatctaacagttccgccataataaactacccaacgtactttgccattactgtactcttcatacattctctcccgctgaagatatccattatatgtaccatcattataaggaatttccatcggagtatctacagcaccatcataagcgccataacgcgtcttatgccatgggcctgttctcttaactccatgaacttttttagttaacggtagtttttgaacgttttgaactgaatctgtactagattccgcagcagatacaacagcagtattagtggttgcaaacagagcagttgctgagaataacactaaagttgcttttcttaatttcatatctaacaccttatacctttcttttattgtttattttcattacctagttgttcattatcattgacaacaaaatttgtcatcattttctttttacttgctaatgtaggaattgggtagcttttaagtttagtattatacaaatagccaccgtacataattcctgttggattatgccccattggaacagtgtacatcttttccagatatcctctaaatacctcattgcctcttcttacagtgtaataaacataagtaccctgatcatgatagtattgacgttgataccagatatgttcaacaaatccttttgattcagtgctttgtgttgcagcttgtacatggtttgattgaaccaaagctgaagttgaaactgatactagtgataaagctaatgctgctttagctgttaaagttaaaattttcttatttcttttcataactttaacctactctttttttcttttcttgctttaattactacctaatccagacggaataggaacccatggacccatatttttctctcctttcttatttatttttcattaattttactttcactactaagaactgttcagaaattgtcaaagatgacaattttctacaataaaattcttaatcaaatgagacattccattacttttcataaattcaataatctgatctacttcttcatttttgccatcaaaacaataatggtaataattggcaactattttagcaaaagcattacgtggaatttctggcaatttagaaatgaaatcgtaaattagatttaaatcaattttccttctttgtacgtatacattagccaaataattaatagctattgctgacattatttcttgtagctgaccagacagattagatacattatggcgatacgttctaaatattgaattaatcaaaaagtccatatcttctggggcatatatcatcatagtcattgcaaaaatttgtagagtagattcactccactcatcagaatcaaagacaatttgtctaacttgtcgtttaatattctcagatatttgatcaatttgtttctttaaagatgctattgaaaataccactaaagcataaagattaaatatattctgactttgatttttatattttccaatttcaattttcaaatcttcaagtcgttcgatctgctgatgataatatgcatcttctaattgcttttgccagatcaaatttttgtgagcaagatcattttcactatcttcattttctattcgctctaaaaatatagaagcttgcaatccatgttgctttaacaaatcaattaaatcctgagtctgaatatcatttaatccacgttcaatttttgaatagtaagatgttgataacacatcccccgccatttcagtttgtgataatttcatactttttcttgtttgttttaatgcttcaccaattgtcatatctttccctccctcgtattatcatatttttcattattgtataatgttttgttaattttgcaatagtttgtaaaacaaaagcattatttttatttttcaatcttttatgtttacaaatgtaaacttagcaagtagaataaaaaatgtgaagagatgaaaataaattatttaatttggaggttacggtcatggatgtaactaaaatcattatccttgttgtcgcaatcgccttgatcggctttatcctttggtggttcttcggcaaacatgacgaagctatcggtaaagcaagtgttaatcaaggcacacaagaagctaacatcgtcgttaacggcggttactctccttctaccattgttttaaaacaaggcgtaccagctaaggtgaattttgatatgcaagactctaccgcctgcttatcgcacgttgtttttgaacaacttggcgttaacaaagatttaaccaagcaaaaaatcactacaattaatatcccgactgataaaaaaggcacttataacttcgcctgcggaatggatatgtttcatggaaagattgaggtcaaataatgagtattttttcaaagaatcaaatcaaaaaagttgtcgttaatgcagataatcacggttacaagccagatgtagttaccttcaagcaaggcaagcccgcacaattgaaatttatcccatcagataatatgggctgcatgaatgaaattgtatctaaagacctgggcttcgatcataagctcgatggtcaaaaagaagttgtggtagacatccctaccgaccacgcaggaacttataattacgcatgtggcatggacatgtttcatggaaagatcgtagttaaataatgaaattatctaatattcagcgtttctggatctcctttgtactctccatcccgatgctcattcagatgattgccatgccatttcactggatgatgccaggatacaactggattgcccttattacgacaaccattatcatggcaatctcagctgcaccatattgtaagagtgcttggggcgccttcaaaaagcataacgctaacatgaatacgctagtggccgtcggtactgctgtggcttacttttacagcatctacgctatgttcactggccgcgaagtttacttcgaaagtgctgcttatgtaacggtctttgttctacttggggatgccatggaagaaaaaatgcacagcaacgcttccaacgcactagccaagttagtcgacctacaagctaaagacgcagcagttttacgttacggtgaatttgtcaaagttccactcgaacaagttaagccgggtgatacaattcgcgtaaaaccgggtgaaaagattccggttgatggtgtcatcactgatggctcaactaccatcgacgaatcaatggtcactggtgaaagtatgccggttactaaaaagaaaggcgacaatgtcgttggctcaacgattaacaccaatggtactttcacttttaaggctaccaaggtcggtagcgatacgatgcttgctcagatcgttgatttagttaaaaaggcccaaaccagtcatgctccaattcagaacttgaccgacaaaatttctaatatctttgtcccagtcgttttaattattgcaattattaccttcgtaatttggtatgttttcttaggcgcaacattggttaatgctatgctcttcgccgtttcagtagtcgtaattgcttgtccatgtgcactaggtttagcgacaccaactgctttaatggttggtactgcccgtagcgctaaaatgggcgttttaatcaagaacggtgaagttcttgaagaagttagcgacattgataccgttgtgtttgataagactggtacaattaccgttggtaagccacaagttactaatgttgtaggtgataaaaacaaggtcttaactattgcagctagtttggaagaaaattctgagcacccactagcaaccgctgtagttaaagctgctaaagaagcaaagactgaaattaagtctatacaaaactttgcagctattgaaggccgcggagttaaggcaaactatggcaatcaagaagcttttgttggtagcgatcgtttattagaagatatttctatttcccaggaaatgaaagatcaggctctccaacttcaaaaagaagcaaaaactgtagtctatgttggcctaggtaatgacatcattggcttaattgccattcaagatgtacctaaagcaagttctaagcaagcaattgcggaacttaaaaagcgtggtttaaagacggtgatgcttaccggtgacaatcaaaatgttgctgaagctattggccgtgaagtcggaatcgaccaagtaatcgccggtgttttaccaactgaaaaagccgctgagattaagaaattgcaggatgaaggcaataaagtagcctttgttggtgacgggattaacgacgcacctgcattgtctacagctgatgtcggaattgctatgggatcaggtaccgatattgctattgaatctggcggtatcgtccttgtacagaatgacttaatgggcgtagttagagcgcttgagatttctaagaagacctttaacagaattaaattaaacctcttctgggctctgatttacaacacgatcggcattcccattgctgcaggtttattcatggcctttggcgtgcagcttagtcctgaacttgcaggcttagctatggccttctcttctgtttctgttgtaactagttcacttttattgaataaaacaaaaattgctggtgaaacagctcaagtttcaaagtaaaataattctccgaccggatattttaatccggttttctttttgtaaatttttcaatttgcgacttaaagtttcagcagtaatacccaaatatgatgctaagtctttcttttttaactttaattccacatttttactcccctgtttttgagctaagtcttgcaaataggccattaagcgttcctgagcatccattgaattgcgccgaatagagttagtttcgattgtaaccagctgctcgccaaaattattaagcaaattcaatgctaaatctggcgtctttttcaataacttttgaaaatcacgacgctcaatagaacaaacataagtatcttgtaaagcctgcacaaagttttcctgggcatgttcttgaaaaagattctgctgtccattagcatcgccttgattcagcacacctaatacggtctctttaccgtcttcgttgagattgtaaatcttggcactgccttgatccataaaaagcattccgttcttaccatcacctggttgtcgaataatactgccttttggaaaatattcttggtgcgttgaaattggtactagtttttctaacatttcatttggcaaatttttaaatatggctgctttgcgaatacaagccatgggtgaatgttgcataaaagcctcatttcttgatctaagtcaatttatttttatctgcatcttaatacaatgtatttaacaactcaagcagaaaggaaatattaatcatgactaaatacatcgcacatattgagcctttaaacgctgaaaaaattggtactaaggcacacggtactgccacttttgaagaaaaaggtgatcaactacatattcacgttgagatgtttgatactccagcaaatattgaacactgggaacatttccatggcttcccgaatggtcaaaaagctcatgtaccaactgcagctcaagacgttaaccatgatggctttattgatttaccagaaactgagccggtctcaggaactacaatggtgccacttgatgatgccccagaaaacatgaatattcctcatgatggttatcctgttgccgacagtaatggacattatgaatatgagattgatgtctcattaacaaagctacaaaagaaattcaaagctgcctttggtagcgataaactacaactagacaagcgtgtagtttacgttcatggtgtacctgcagatctggaattacctgatactgtaggtggttgcgtaatgagttatgatgcccatactaccttgccaatcgcagctggtgaaattgaaaaagcttaagttaaaagccattccttgtgaatggctttttgcatcctttcttattttttgatagcatagatatagattatgtaaagtatctaagaaaaggagatgttttataagtaggcttagatcctactcttatggagaataacgaaaaaattatccaagaaaagaaacgcgaaaaatttattaaaactaaaaagaattacaagcgtgcaccactaatgtcagttcacttaagagtgatgatggccgttatcttaggtcaaatcgcctgtggctattccctgggaattagtggtaccgctctttctaatgcagctaaatatatcaacattagtgacttctggactggattaattggggctggtgctttaattggccttgctggtagtcttttggtcggtcgactttctgataaaatcggtcgccgtaaactcttaatgtggaatatgtatatattagctgctttttctttattacatctaataaccgctaattttagcttaacctttatcctccgtattggaattggtttaatgattgctgttgactatactgtagggaatgccttgttaaccgaatggctacctaagggtgaagacagcaagcgccagagtcatttattaatctactggactattggttttattttgtcttacctagctggtagttttatcactggatttgatagttatacttggcaaataatcttagcaacaagtgcagtacctgcactagtaactgctatcttcagaagtcttttcccactccctgcttcaccaggctggctagcaagtaagggtaagattaagacggccaacaaggtcattcgtaagcacatgggacgcaaatggagattacctgcccgctttatgaagcggaataaaaagaaaactcctagaaatatttcctgggcaattttattttccaagcaatatctgcgacgtactctagtaggtgggattttctatgcctgccaagccttctcatttttcggtattagtatcttcttgccaattttattacaaagcatgaatatcactagtggaaatatctcaggaattatctacaatggtgggatgttcattggtgtgctaatcggtacctggatctttaacaaggttagccgccgcttctatcttatcagtaattttctaatctcaggtctgctaatcggcattttagcaatagtacctaacttaaattcaatacttaaattaggtatttttacgttatttgcgattattttatcagctggtttgatcctagattatccttatccgactgaattatttgatctgaaggtacgagcaactggtgtaggtacttgtattacaatcagccgaatcggggctgccgcagggactttcttattgcccgtcttaactaatgtgggtggtgctagcctggcaatgctagtttgtgcgattgttttactctttgcctttatcgtttgcctcatctgggcaccggagacctcaccccaatttatgaaaaaataaaataattaatatgctacacaaaaagacagattacatatgatgcaatctgtcttttcttatttcttatcttttttcttcttgtccttagaatccttatttaataattcttctggatccttatgcttaggcgtcttctttggatctggtacagttgcaaagcgatcaagcatcttctgtaagttattagggttgtcaaaagttaatcccataaaacatcttcctttcgttttctcaattatattaaaatttcaattcaaatgacaataattttaaccctcattatcaataaattgttgcatcttaatcatttctgaaccagccagatcaacactaattaaatcactataatcatgaacactagtatctcctaaaccatattcagttacaatttttaggtcgaagccactatcagagcgatcttcaattaagcctaaacgatcaggataatgataaattgaatcactaattttcactatttgatcttcgggccaattatcaataatttctgctggtgactgaatttcatcccgtaatttaactgaacgctccagcctgtccggatcaaaactgccattatttttttgccattgaactaaaaaattaaagaagagcaagcgctcggaatcttcagtaatatgcgttatatggctcctagcaatcactgcaattgattcaacctgccctaactcattgatgctctcgaataccagattatcatcgtcatacttgagtactttaccaatagcaaaactaccatattgatcatcaaaggtataatcaaaataaatttcaaccagatccaagtcgttagtgaattcttgcttctgtgattgccgcaaatattgggtaaataagcgattatcaatggcattagtatcgacacaaacaatatcgtcaagtggtataacggtggcataatgctctaaagttaattcattgcgttctaaaatacgcacctcttgctgatcaagttgagtaattaagccagtgtaagtagcacctgtattcacctcaaaagttgtaaagggttgcgcgtcagctacgttaatcagtaaatcatgcagattagtaaaatcccaggctaacactgtcttatttaattgctctaagttaaatgaatccttaacttgggtaatcatataatagcgtagattaggcgtatcgtcttcaatcttagctacttgatcttctttaataaagactattccacctaaattaccgccttgatcgactgattcaaaggtaatccagccatgatgttgcgtgataatgcggccaatatagtaagaatttgcatcaactaccgtaatacttgcatccccacctaagttatatttttcttgatcagccttaagcgtgatttgtacaagtttattcaatttttcgccccctcttttttcttccgtgaatttaattgtcgcctaatcattatttttctgcaagaaaaaagaagatggtttagccatcttctaatattgagttaattctgtagaattttggggctaacgaatattacttcttttgtgcagctgcctcagcttctgctgctgtgtttgaaggggttaacgaagtactgtttggatcaaaacgcacatcgcttgcttttacataaccatcagcaaattggacttcaccttgattactatagacagatttaccaactaagtgataaaacagttctgccttattttcacttggtacccagatgtaaagcaacttatttaccttgtatcttccaccttgttttctaacttgatcgcccttgaagtcaatcttgtttccgttagcatcatagatatcagttggcttaataaattgaattagtgattttttagtatgataataattttgaactggaatatctttagcagctttaacattgaaattataaatccaataatcagttcccttaatatgatagattgctaattcgttgtcatcgtcaccatctctaccagtatcagcacgtgtcccttgctctaaacgatccactgtaaacttatcaccttgttttgcgtattttcctgaaggctgaactgcatctttatcaggtacttcaacaaaaagagcagcacgtttatcagttacagtaacagtcgtttcttctgatttagttgtttgagacgaagaagaactagtgttgttatttgtattaacactaattacaggacctaaattataagacttaatgtactgtttattaggtccacctattctaaagtaatgctttccgttcttaaatttgtatgaaccgccataagtcgtgatagtttcacccttatacaatttccaacggttattgtaagaggttctgccagttgaggtacgataaatgtaagtattatgagtaatcttacgtgttacaccatcaatgttggtagcctttatgtattgatccttgccgcttactttatagtaaagcgagccgtcaattttcacagggttgctttcaacagtgacatattgataggcattgtattttacacctgtgctgttaccatccttgtcgtaagctaaagcagtatgcataactgctttagtcgtagcagcttgtacttcattagttgtattagtcaaaacagccaagggtgcaactgtcattaatgtagctgcagaaattaatgcaatcttatttttcttcatcataatcatccttttcaaatctctacactgctattatattctctaaagctaattaaagcattaaaaagaagccaattaagtgaagtggacttctacttttgatattttcttttaatttattttttcaatgccgttgcctcagcttctgctgctgtgtttgaaggggttaatgtcaaacctatattaacaaatttaacatcactagctttaacataggcatcattaccaacttcaatttgatcaacgttacctgtagcatagaacttagtaccaactaaatggtagaataattctgccttgttttcacttggtacccaaatgtatatgagtttatctactttcagatttccaccttgttttacaatttttgcgccattgtggttttgcatagtaccgtcagcattatacacatcagtatccttgacaaatttgatatagccataatgttcgtgatcataatcatgctttactaattttttatcggcagttacatcaatagctaaaagccaattgtctgtaccttttattctatacattccagcttgtgctgcagttgatggaaaatgatcagcaaacggagtaacttctagtttatctacaataaacttcgtaccagctttgagattctttttgattgctttaccttgattatcataaatatttacaccgtaagcattttttacggtaacagttgcttcctcggcattagtattagtagcgttgtttgattcattgctggttaaatttgatgcagtattagtactaataactgggcctaaattatatgatctaatatattgcttacgtggcccacctactctaaagtaacgtttaccgtttttaaatttatatgatccaccatatgtagttacggtttcacctttataaaatttccatttcttactgttggcagtcataccataaggtgtcctttgagtagaagtccggtatatataagcattatgagtaatctttcgggttacaccatcaatattagttactttgatatattcatctttatctgtaactttgtaatattgacttccattgatagttactagttttggatctacatgaacactaccataaacgtaatatttatgaccggtactatttccatctttatcataagctaatgcgttgtgcataatagtcttggttattgaagaatctgcttgtactgtatgagcgctagttgtagtactcaggataggtgccgttcccattaaagctactacagaaattaacatgattttattttttttcattattaaccaccctttgaaaatctctatacttcaattatcttactttgtataaacttagacaacaaaaatagcatcaaatcatattgatttgatgctattaaggctaaaatttacaaatttagtcccaagctaattcataaaccttatttgaaacagttttatttttaccgttaacattagcatggtatgcaacagttaagtaaccgtgattttcatcaataatttggatactttcaacttcactatgttcacctgaaatatctaatccaccaaatgcacttaagtttacattttcccattgagattgatcattacgtgcataaaacggaatttttacaatttccttgtgatagtatgaccatgaaccattacttaaacttggtgatttttgactagtaatataaatattaccagaattatcaagatcataaccttgtacagagtttaaaacagatccatacaaaccatatactgtaaaactagtttcacattgataatttcccatatttacgaaaccattatttccagcctcatctaatgcattattaatgacatttaggtcataaattgaaaagtggcctgttccattattctcaatagtagcaattaaaagcatactataatctggtgaaactgctacttcagcgcgttccatttcatcaccagagcattgatcttcaggattacctgcgcggttcaagtatgctaaacgtgggaattcagtatttgatgaagcatatgatttgtatctaatatctgctcgagcaatttgagaagcccatttattcttgtttttagtaccaacgaaccatttaccagatctacctgaatattcccaagtttgggtgtgtccagctgctgcacctactaaagtaagcacaggggttgtcacgttgccacggaagccacgcaatacatgtgtttctgtctggttatttcttaactgtaaaccataaacatactttgatcctacattacctttttgaactacagctctgtaacctgtattcatatcgaatctatctaaaattctaatatttgttgcatctaacataataaaacctccgaaaaatttaaaaactactacttatcctgagtttgctcattcatctgtttagccacttccgcaaagatgtcctgcacttcttgcctgttcagcttgaagccttttgcttcaaggctgttcactactgcgttgccaacacggttaatcttctgttcgtcagaaagattttctttgtcgtataagcgtacatagcttttcattaagctatctgcagtattgcggaattgctctaagcgtttattcttgaaatgaactctgctcaagatgccaatacctactacgctaattacccataacgccagagtaatcagctcaacgtaatcatgaatatccataattgaatgaatcacctctcttttgatcaaacgatccaagggggctaacgaatgtccattggacttcacctctgtttgataatgttcaacaagacactaatacacttgatttatattagtttttagactaatataaatgtataagaaataaccgaaagctggtaaatgttccgccaagaattttattaacttaggttgttttctttttcatatctcgttgacaatatttactataagttaattaactaattatgtcaataaaaaaagctaaaaaactattattttttcgaacaagtattcttgaaaggcttggtatgattgagttagagcgcacaaaagaattagcaaaaaaatacaaaatgaatctccgtgaagtaaatgacaaggcaggtttaggtagaaattccatctataattggaagaatcaaagaccaggaattgatgcacttaatgcagtcgcagatgtactacatacgtcagccgattatttaagtggtaagacaaacaatcctagcccgtcacctaaaggtgatgaaactggtggtatttctattgatggtgaagtaccatatttctatcatggctacactattccagaagactacctgaacatagttcgtcaacttatggaacgtgatatcaaaaaaggacttattaaacgacatgacaacagcagatcagaataaacaagaactcatagactggttattagcctatgctaaaaaacgtgatattatggttgaattagttgaagtaaatccaacttacccatccatttctttaaagaactatagattcgctgtcattaatactaattggcatcatcaagaagaagtaccattttcaataggtcatgagattggtcacattatgctgactaatggtgaagtagattctcgtcaatatatcacttttacagaacagaattccgaagaaagtccagcagacatcttttcaataaagctaatctataattactcctgcaaaatgggtgattgcttcgaagatacaggtttatttatgcaagcatacgggataccaaatcgagtagctgatgcaactaaagagatatttaagcgagcagcttaaccatcaacttctatattgatttgattactaaaagttttagcattagtttttacactacttaaaatccaattaaacaaaaaatcgctactcaattgagtaacgattttttctatccatccagttcaacgccttgcaagtccttcatcttgctataaaccgcgccacgttgacttgaatcaaactccagaataagcatatctccgccgcgaattacggtttgaccatttggtatgatctcatctccatcgcggtgaattgttcttaccctagtatcaaccggccattgaacctcagaaatggttttatcaaccagtctactgctctcatagaccggcagagccattgtatcagcctgaccagtatagttagccttatggtcactactcttgtccatagcggctgctagaagcccgtagataggcttaccgccaagaagttcatcaactaataacgcaatgaaggccaccacagctaatggcatcaagtgaagtaaggaccctaccatctcagtaattaagataatcgccgtaaatggtgcacgaatgattgctgcaaaatatcctgccattgaaaaaatcactaggttaactactaaacgctgcggtaacaagcctaactgtaccatcatcagtccataagttgcaccaatcaaagcgcccattgtcaaaattggcaggaagataccactaggaagacctgaatcataagcaacaatggagaaaacaattctcatgacataatagaaggctagcatccctacaatgccccaacctgttttagtgattatattcggcaatgccagaattaaccgattacctggaccggtgattaatggccaaaagtaagcaatcgggattaatattgccaaaggaataagtccatgcagccaacgaggtaaaatggtgattttagcatagaccttctttaaactaaataaaccaactttatataaatgacccaataagcctaataaaatccctaagataagcaaatgccagtacaacgaaatcggaaatgaatagttatattgaattgctagggcgtgacgaatgccaaacaagtttgaaacgacaaagtttgaagcaattgcgccagctaaagcattcatccaaactaatggtgaaaagttatggaatacttcttctaagacaaacaaggcaccactcaaaggagcgccaaaagcggcagacaaaccacttgaagcccctgttgcaagcagaattctagtttttaatttgttctgcttgcatccctgagcaacaccttgaccaattgtcgagcccagctgcaatgatggtccttctggtcctaggaatagccctgtgccgataaccaagataccaccgattaatttccgccataaaattggaaaccattgtagtgatagcttcccttgcagttgcaattttacttctggaataccagaaccaccaacatggggatattgtttaacaaaataaccagcaattaccgctaccgcaataaagccaatgataatcgcaataaaccacaacggattctggtgcgctaattgaaacaagtataaccaaaaaccagatgtcttttcgattccaaatctaaataaaccaactactacgccggtacatattccgacaagtagtgcttggagcaacagtttaatattagttctgtttgcctcgtctttcattactttctccctcacaataaaaaaaacgtgtcacaaactattgtacaacaaaaagccagctagaaatgttccaatgtcattaagttaagacattgacaattaagggtgcttttttagagatcgaatcatttggattcgatctctttttttgtataaaataaaggcgaaaagaccagccttttcgcctatcttatatattatatattttaaaccttcaaaattattgccagaaagatggtgttaattatgaaagcccttcataagaatattctagaacgtcttgatcaaattatcaataatactggggatcatattcacgattttattaataatcctcatgcttttaccaggaaacgcactttagatgcagcgacagtccttaaaactacaattaacatgcaaggtcagaatttaaacagtgaactctttagagcttttggcgaagatgcaactaaaaagaacgataaagtagttagtacttctgcctatgttcaacgcaaaagccagctttctcctgcttgttttaaacatattctgactgtttttaatcaaaatctatttaatattcaactttttgatcatcactaccgtttgtttgccattgatggctctgactttaatcaaatctggaatccgaaatcgaataacattgtacaagcttcttctcataaaaagaaaccctattgtcaaattcacgttaatgccttatatgatctattgaataatacctaccaggattgtatttttcagcctaaatcagaaatggatgaacgcaaagcggctgttcaaatgcttaaagctttgaattgtggtccatatattgtaacaatggatcgtggctacactagtttcaatatgattgaaaactgcaatcgcctgcctaactgtcattacataatacgaactaaggctggacaaggcggagttaaagaaataacgacattgcctgatcaagaatgtgatcgtgagatttcctgcctggtaactacttctaactattactacatcacgcataaagccagtgagaatattcaccatgtccagcatcattatcgccaatatattaagtatcgctctaaaaatacccaggatctaagctgggattttggcgagttatgcacaataaaatttcgagcctgcaaatttagaattaatgatgccaaatcaggcaaagaagaatgggaagttgtgctaaccaatcttgatcgaaaaaattatccgctaaaaagaattaaagagctttatcatctgcgttggggtattgagacctccttcaagaaattgaagtattctttaggcagtgtacagttccattccaaacaagataaatttattgaaatggaaatttatgcccatatgattatgtttaatgcaatcagtcaaattgatgcacaggcctatattccgcaaaagcattgcaagtatcaatatgccatcaatttcaagcaatcatgcttgattattcagagcatgtatttggcttcttctttaacgcaagattttgaacggatccttattcagatcagctattataccattccaattagaccaggccgcaaggacaagagaaatattaagcccaaatcagctgtatattatttatatcgcgtagcttaaaaaagcagaatctgtgctatgccttatttgttgtacgaaaaaagcaccaatttaaccaattaaatgttaaatcagtgctttaaaagtctaatattaattgtcaatgtcttaacttaatgacattggaaatgttctaactgacttttttgtttcatgtgaaactaattatttttcttcataccattcggtgtggaagacgccttcacgatcatttctaaggtaagtgtgcgcaccgaagtagtcacgttggccttggatcatattagctggcaagtttggattaaagattgattccaaccagttaagagctgcgctcaaagttggagttggcacaccacacttagtagcaaattcaactgacttacgcaaagctggcaagttttccttcatcaaaccgcggaaataatcgtcttggaataggttcattagcttgccgttcttgtcataggctttttcaatatccttaagcattgcggaacgaatgatacaacctgcttcccaatcttgagcaattgacttgtatcttaagtcccaatcataagcttcagcagccattgtcaattgttggaaaccttgagcataggcaacagcttgggctaattgcaatgatttttcgaatacgtcaaccatatcatcaggaatttcaccattgtattcaaacttagttggtttaacgcccttttcaattgtcaagtgtgcttgcttactcatgaaacgtgccattacagcctcggctaccaccgttacaggagcgccaagtgcaacaccatcttcgagcatccagttaccagtacctttgtatgaagcaacgttcaaaatgtgatcgattacgtgatctggcgttaaatcatctttttgtgccaaaacctttgaagtgatttcgctaagatatgcttctaccttaccatgattccatttatcaaaaatttctgacatttcatcatcgctcttgtgagcaacgtcacggagtaagttgtaaacttctgaaaattcctgcataataccgtattcgataccattgtgcaccattttgacatagtgaccagcaccttcaggtcccatgtagtagacacatggcttgccttcagtattcttagcggcaatagcttcaagaattggagcaacttccttataggctggttcatcaccacctggcatcaaagctggaccattcaaggcaccctcttcaccaccggaaacacccataccaataaaatgaatgccgtgcttttccatttcgtggaaacgacggttagtatcgtgataatttgagttaccaccatcgattaaaatatcgcctttatccaaaagcggcagcaatttttgcaaagtttggtccactggatcgcctgccataatttgaatcaaaatcttgcgtggcttttcaagtgagtttacgaactcttcccaggtgtagcaaggctttaatttatcatcttcatattttgcgaaagcatcaacttctggtttgtcgattgagaaaccggaaacggagaagccgtggtttctaacattcaaagcaaggttcttgcccataacagacaaaccgataacgccgaattgttgcatgtttattaattcctccattaatcaaagttcatcaagtattattatacgttctagcacgcaaaaaagcgaaaccaaaaggttccgctttttaaaatctagttaataatttttttgttattgggtaaaggtgtttcacacactgctcggtaatatttcctaggaaatattacttttattgatcaataccccaaagtaaaatgttaaatgctaatggtaatgttagcttggtaatgtatccatcctttttagcctgttttaaagatgctagaacaaatttacgttgttgacccgttagctttttggctactttaacagctaaattaaagtcatactcgttttttctaatagcatttttgataactatctttgcccacagaaataggttgagaatcggagtttacagttacaatgtagctccacttgctaagtcgaggaatatttttaattgttatagctttatcaaacttagctactgcagttgaattgctgttgtctgcagcgttggcagtgacagacgatgctgaaaataatgctgcaagtaaagcagtagcaagtaaactaattagagcttttttagatttcataatttagcatctttttacacatagtgcttattggctaataagcattaattcatatccaacactgtctattataagcatctgtattctatttactagccaacaaactattttatatttaaaatcgtatataaaatgaggctatttcccaggaaatattttcccatacaaaaaaagcgggacaaacgtctcgcttctttataattactcaaccaaattagtgttgtgaagcacctgaaaccgtatcaggagcaggatcctcttctggttctgattcttcatgttgagatgcacctgttgcagcgtcagcttctaagccgtacttttctgcaaagtaactgaatggcttcaagtcttcagcttgatacttcttgacaaaggctgggtcgtcaagtgagttcaactcagttgagtaaggcatttcgtgagtgtacttgacgtcgatcaacattggaccgtccatcttcttgaattcgtcgacagcatcttcgaattccttcttggtgcgaaccgttacacccttaacattcataccttcagcaacctttgcccagtcgttatcagggataataacaccagataatggttggtgagattcatcttcttgttctgcttgaatgtaacctagtgtttcgttagtaaatacaatattcaaaacatgcatgttgtaacgagccatagtaagaagttcttggttcatcatagcaaaaccaccgtcaccagctaattgccatacttcacggtctgggtaaacagttgctgcagtaagagcagctggagcaccataacccatagttgcgtgcaagcctgaagtagtccacttttgatcatcatgcaagttcaaaagacggcatgagtcaacgttaacgttaccaacatcaatagcaaagatggcgttgtcatcagccttcttgttgataacatcccagattggttcaggacgtacaggcatttcatctgagttcttaaagcttgcttgccatgcatcccagttctcacggtctgcaatagcagccttgtaaagtggtgattcgctacgttcttcaccagcgtcaataattgctctcaaagccttcttagcatctgcaagcattgaaacatcagttgagtgacgcttaccaaacttagctgaatcaacatcaatttggataaccttagcgttcttagggaaccataaaactgagaatggtgagttgttacctacccaaacaactaagtcagttgcgctttggacttcttgagcagccttaggtccgatacggccgatagtacccatgtatgctgggaatttgtcttctactacacccttgcctaagtatgatgacataataggggtcttgaacttttcagcaaattccttaacttcttcaccagcatcctttgcacctaaaccaatgtacatggttgggttcttagcttctttcaaaagcttaacagcttcttcaactgaagccttagttggtgctggataattgtctgctggatgagcatccttgtttacacggaaggtgtcatcaatcttttgccaaccgtagtccttaggaataatgataactgcaggaccctttcttgcgtaggcttgacggatagcttcatcagttaaaattggaatttgttcagcggtcttagcttggcggcaccaaacactagcgttcaagaaccacttgtcttcatcaaaagcttggaagaagtcaatatcttgacggctagttggaacgttagcaacaattgctaccattggagtcttgtcaaacttagcatcatacaaaccattgaataagtgggcagcaccaggaccagctgaaccgaaacatacacccaacttaccagttaacttatattctgcagaagcagctaaagcaccagcttcttcgtgacgtacttcaataaatttcatcttatctctaaagtcatagatagcgttcatacttgagtcgaatgaaccacctgggaaaccgtagatatgatcaattccccaatcgtaaataactttaagcattgcatcagaaccattaatttttgtcatataagtgcatctccttaatttttgttctttcataatgtattaaaacactttttttcacatttgcaaaccgataaaatcaccgttattacgcaaatgaaaacgcttttgtaataataatcacttcacaagctttaccaaattcaatatctcaaaaagctgaatggtagcgttttatattgtgatttgatgaacattattatactaaatttcacttattttatgtatattcattgttacttatagtaaaaatttaagaaaaaattttttacaatttatttcatagctatccaatttagaaaaacgttattttataattttgcgcataaaaataacgtagaatactattcctacgctatttttgtgctattctactttttcactctagagtaacgcccattttgaatgtaaacactcaagattgccaagtcagctgggttaactcctgaaattcgttctgcttgagctaaagtttcaggacgaattttttcaaatttttgccgtgcctcagtagctaaaccttcgatttggtcataatcaatatctgctgggatttttttggcttcttgtctctttaagcgagcaattctggtttcttctttcttgatatagccagcatacttgataccaatctcaacttgttctttaacgtaacgatcgcctggaactttttcaccagttaaccgttcaatatcagcaatagtaacattagggcgacgcaagaaaacatcggccttaacaccggccttcattggttcctgaccaatactttgcaaaaattcctgcacctcatcagttaaatgaaccgtaatttcatgcagtctcgtctttgcatcttcaatcgcatgcttcttttcttcaaatcgtgcgaagcgttcgtcagaaattaagcccagatcatgaccatattcagtcaaacgcaagtctgcgttatcattgcgtaaaatcaaacgatattctgctctactagtaagtagacgatatggttcattcgtccctttggttaccaagtcatcgattaacacgccaatgtaagcatcgttacggcctaaggtaaatcctggcttatcttgagcagataatgccgcattaattcctgcaattaaaccttgaccagctgcttcttcataacctgatgttccattcatctggcctgcagtaaataaatgctttacgtttttggtttccaaagtatgcttcaattgccatggttcaaccacatcgtattcaattgcatatcctggtcgcatcatttccgcatgttctaatcccgcaacagaatgaatcatctttaattgaatttcttctggcattgaagttgaaaagtcgcctacataaacttccttggtagtctttccttctggttcaaggaaaatttggtggcgatccttatctgcaaagcggacaactttgtcttcaattgaaggacaataacgtgggcctacacccttgataattccagagaacatcggtgcacggtcaagattgtttctaataatcgtgtgtgtggttggattagtataagtcatccaacaagaaatttgtttttgtaaataatcttcatcacgactttcatatgaaaagtgccgtgggattttatcaccaggttcttcctcagttttagaatagtcaattgtattgccgttaacacgtggaggagtaccggttttaaaacgacgcagcttaaaacctaacttttctagattttccgacagcttaattgaaggagtagtgttatttggacctgaagaataagtcaattccccaataataattttaccgcgagccgctgtacctgtagtcaaaacaacgcttttagcatgatacttcgcaccagtattggtaatcacacctttgcagacgccatcttcaactaccaattcatccacgatagcctgacgcaaggtcaagttgggcgtattttcgatcgtatccttcatgtgttcatgatattgccacttatcagcttgagcacgtagcgcacgcacagctggccccttacccgtatttaacatccgcatttggatataggtagcatcaatgttctttcccatttgaccacctaaagcatcaatctcacggacaactgtccctttagctggtccaccaacagatggattacatggcataaaggccaccatatccaaaccaatcgtaaccagcaaagttttttgtcccatgtgggcacttgccaacgcagcttcacatccagcatgcccagcaccgacaacgattacatcatattcatttgaatcatatgttttaaccattttcatcctactttcctaaacagaattgactaaataattgcgtgattaattcatctggggcactttcaccagtgatttcacctaaagtatcccaagcaccagtaaaatcaatttgtgcaatatcaacagggacgccatcttcaactgcttgaattacatcttccaattctttcttagccttatgcaataaggaagcttggcgttgattggttaccataatttgatcattagaattttcaatcccagcaaaaaatagcttattaatcaattcttcaagcgcatctaagttttgttctttcaaaatcgaagttgaaataacatcactacccgttagtttctccatctcagtagttgttattttttgacctaaatccgacttatttaagatcacgattcgcttcttgtcctttgttgcttcaattaaggcttgatcttcagctgttaatgcttgactagcatcgattaacaacaagaccagatctgctcgctccaaggccttttttgatctttctacaccaattttttccaccttatcttcagtgtggtggattccagcagtatcaattagctctagcggtactccttttacagacacatattcttctaacgtatcacgcgttgttccagccacatcggtcacaatcgctttgtcgctttgagtcagataattcaataaagaagactttcccacattaggacgaccaacaattgcagtagccaaaccattgcgcaagatttttccttcttgtgctgtcttcaataagcgattaattttatcaattactgatctagatgtgtctgccatctgttttgcggtaacagtatctgcatcatactctggataatcgatattaacctcaacgttagccaaagtattcagaatttcctgccgcattgcctgaatcttgtgtaacaatccaccagctaattgaccaacagccacttgtcgtgccttatccgtcttggcccgaacgatatccatcacactctcagcttgagttaagtcaattcgtccgttcacaaaagcacgtttagtaaattcaccaggatcagccattcgcgcaccgtgactcagcaacaattgtaaaatatgattagttaccacgattccgccatggcaattgatttctacaatatcttcacgtgtaaaggtcttgggcgcacgcagcactgtcaccattgcttcatcaatcgttttcccagtatccggatcgataatatgaccatagtgaatagtatgtgtcggcaccttgcttagatcttcgcctttaaaaacctcatcagcaatcttaattgcatcctcaccagacattcttacgattgaaattccgccttcaccgatgggggttgaaattgctgcaatagtatcgaactctgtcaaagtttgagccataattcttcccttttctcaataaaaaaagcgcattataccaccacgaataaccatgatggataaagcactttgactactttatctaaaaatcattttagactaatattcttttatttctttttgcgtcctaaacgcttgtaagcccttcttagtttacgtttgcgttcacgctcagcctcagcctttgcttcttgctctcttctatatttaatagggttttgcaagataaaggtttgaagcgcctggaacaagttggaaattacccagtaaagtgtaatagctgactggaagtttaaggccatcacaccaaccatgatagacattccgtacatcattactttggtcattccattttgcgatgattttggcgtcgataattgactaatatacgtcgataagaacgtaaagatcattgctaaaataggcatgatgtaatatggatcgggcttgcttaaatccatccataagaagcgcccattttgtaactgcggtgtacgtaaaatcgcaccatacagtgcatacataactggcaactggatcaggacaggcaaacatccagtataaggatttacgcctgcttctttataaagcttgttagtttcttgttgtaataatgttcttgattcagtgtcacgtcctggatatttcttacgcaactcattaatttgtggttgaatgctttgcatcttagtagtacttcgaattgaaatagcattcaaaggtactaagatgacacgaacaatgacggtgaagacaataattgcccagccataactgttccccattaacttagctagccccaaaataaaagctgacatgtaataaacgatccaacggtcccaccaattaccacttgtatgtgagattggcgttgcttgaccatttgctcccgtagtagcacatcctgtcaatacaacagcaagtattgctactgctaagactgcaagaagacgtttgacatttctcttggtcagaatgtccttcaatctatttttcctcaactttatctggcatttcttcaataatatgagctaacgataatgcgtgaagcaagtttttacgcacctgagccatattaaaatcgcgagcataaggtcgcgtaatgattaaaaaatcaacatgcggattaatctgcaatttttcttcatcaatcacggcccgaatataacgcttgagtcgattacgtgcgactgcggtatgaccaacctttttgcccacagaaattcctactcgaaagtgtttattttctgttttttctaccttataaatgacaaaagctcggttagcgactgagtcgccagattcgaaaacttgctggaaatctttttcagattttactcgataagactttctcaaaacgtttcattccactctagtagactaaaaaaaccactgggattcagtggtttaagcagataagacttttctaccttttgcacggcgtcttgctaaaaccttacggccatttgatgtgctcatacgcttcataaaaccgtgaacacgtgaacggtgacgcttcttaggttggtaagttctcttagttgtcatattaaactgcacctccataaatttttgtgccaattgcacaatgtcttattaaggatagcacgaaaagccataaaaaccaagtattttaagaaaaaaagacttttaaatcccgtgaatattttctaaaaattcattgtttttcatgtggataaaaaataaaatatttttcttacgtataatttccacaagataattcccaacgttttccacaactcacatggtgttaaaaacttaattcacaccatgtggataacgcatatggtattttacctcaagtattgatagaatagtatccataattcacagctgtactgtgcataaattaacggttttgctcttatcatgtcaaaatgtgcatatcgctttaatagttgtcaacaggctgtgtgctttgttgatttctttttcacctgtggaaaaccagttaagtaaatggtaaaataaatttgctttttactaactgggggaatgtaca

(The sequence listing continues in the following parts.)
